United States Patent Application Publication US 2007/0054278 A1 - sequence listing, part 42

SEQ ID NO: 94548 - DNA, 35867 bp, Homo sapiens
tctcggaggcaatgcagcaacatgtatttaggctcagcaatctctcaattctataaagctgcaatccaaagagctgaatttgagatgtggacaaagatctatgcattcagatgttaatatttatttcatttactcattcatctatttactttgggcaggggttcacaggtgttcactgtattactttgctggcatacgtgaatatgtgttcttttgcatgcatcaaatgttacataattaaaagattttaaaacctgagctaaatatacacgttacatttctatagcacttccaaatcatttcatcctcgttatcttatttgatcatgaccttcctgtaagttgggtagggggagccttattctgggaaaatcatggacacgtggttcagcatgccacctttttccctgtcccttttctagaaaatctgatccacccttagaccttgaaaagtacagccccatgtagcacaggatctcccaccacaactgctggttagagtgaggctatctgcagcatcaaaactagaaccagccttacatatccaccagtaggaaagagtgacctccactttggaatgaaggattaacatgtagccagaaggcataatagttttgtttttgtttttgttttttgagatagagtttcactcttgtctcttgtcgcccaggccagagtgcaatggtgcaatctcggctcactgcaacctctgcctcccgggttcaagcgattctcctgcctcaacctcctgagtggctgggattacaggcgcccgccaccatgcccagctaattttttgtatttttagtagagacagggtttcaccatgttggccaagctggtcttgaactcctgagctcaggcaatccacccaccttggcctcccaaagtgctgggattacaggcgtgagccaccgctcccggccctggtaaatttttttaacagtgtagattaatgtagaatttgccccccaatgggtctgtaatttctttctcatttccttgtaatcccctagtactcgacctagaagacactcagacgtagttaagcaactgatatcctgagagagccctcggaaaatggagtgtgatttaagaataaaaaaacaagaaaaagaaaaaatttcacgtcaatttttctcttttcctactgctgcataaagcacagctctgttgcaaaataatatctaacatttaatttgataaacctgtgttggttgagcacttactatgtgccaagcactgagctatgtccttgagttgctacccaacgtgaaattcgagtctatccaattttctgacatctcgtctccacactggtgtccactaaactgttttccctactggttttgatgcatcactgaataatctcacttcctgggtgaaaaatactttacatttctctcttgacaactgtgtttcaatagccttccattgacctacatacctcaggtatgggcgtgtgtgtatctggcattttcctccttgctgggtgccaattttatgagacataatccacaaacagttcaaatacctacttacgcttaagaatctacctgtctatatatttccagaagcttcagtctctccccacccttatgtatattagtgctaatgaatatgagcattaaaactaatctgttcgtcacagactaacttctgattgtcacaaacaactgacagaatcatctttggcagtttgattcttttcaagaaaaaaacacgactgaaaacgattaagataaacttgagttaaaattcccccccaaacatactgatagacaaaaggtgcttaacctattgtaagattaacagcagtacaattaatagtaatagctcccatttactaagtgctttactttgtgctaggcactatgctactctcattatgaatatctaattttgacctcacaacagcccattttacagatgagtagactgacttcagaaagaagtatacggagctagggctccaatctcgggtctgtctctatccactaaatggcaatgtgtgatactaccaacactattttaaaaagttttcgattctacatgtagatagaactttttctatctatatactctaatatgtttgtttataaatatgcatatatatgaaattggtaaatttaccagagtacaattattctaataaacaacctcatagttctatagttaagatggacctgaactcattttgttgaaagtccctgctttttatctgaacagtgcctacaaaaaaaaaatctgtttgcattttactgaagcccctcagttcttaaggccttttctccacactgtccaggagagctcagaagagacacacttagggactcagtcgccatgrcaactgccaagctgcagggcctccagctgggaggtgggcctggaaggttgtggaaaatacagaaggcagccccagggtggtttcaacagtttccccggcctaggccatcccaccaggaagcagaaggcaccctgaccagcgcccctgcagagatcaaccatggccagcctgggactgtttttcttctttttgaaggggttaatgggtaaaaggaaatggatcgctccatttatacttaagaaggacaagaagatcatttcttacggaagaaacgaagtacagaggaaccgtggccactgttgccctccactctctcgagggccttcccctcggccctccctcctccctgcagagccgcacttgcgcgaacttcccacttgggggttatgggaagggcctctgtggatgatgggaaagctccgcaggggataatgggaatgcctcgcgggggatgatgggagacccctgccagaggaatatggacagccccttttgatttttaagtagtgaaagaggatttcctctcattttccagtaaggaaaaacctcctgatgatgtcctcatctttctgcctctcatctccccaccactcccacgccccaggaaaggaggaaggtgggctgaacaagcattttgagggccttcagaattggaaagcgctgcttctggcatcaccaggcatttccaggtcactgtggggttaggagtcagggatcctggggctctgagtgaggcatcgacttggcttgatgaagtcctcctggggcttcctgggtgcacagagaggtgcccagagctccgactgcctcttggcagctgtggctctcagctggatctgggctgggatgcagcttctttctggaaggaggaatttagaatccagtccaggtgctgctgcaggagatgccgggaggcccatcctgttgttcaccccttcttgcctttggtgtcaattatttggataattgccaaacccacagtgtggtgaaattactatagattgactgaaagatttgggagggaagaccctggctaattcgtatgggatagaaatcaaattgtaaaccttaggatttaatagctatagctagacgtctagctgctaatgatgtgatccagaacagggtttgcttaaccatgtggtttgcttaagccactctctggtgtttgcaatccaaggcatttgaactagtggtcctctgcttggtagatggtttagtcactgccagaaaactatagttatttctttatatcacagatctgggaggcagtatagtgatgggcaacagttgctcttgggtcagctggcttgatttgaatcccactagctgtatgatcttgggtaaggatcttaactgctgtcgaccaaagttaaggctgttgaggcggaaattgataaaggcttattgaaagccaaatttgaagattgaatggggaagacacaccaacaaagttgggtgtgttccaaagtctgttacaagttgcagtgcttttataagaaagttgaggaatgggaaggggactcctcatattgcagttgtcttttttcattggagggacaatatagaggttacartcattggctacagatgacaacatacaggctaaaatgttttctgcatatgcacaagacaatcagtgaaacgtcatgattcagaaacaaatcagtatccttttcagtgtcagtagtttacgtattaattagtacatcaacagtctgaggaactcatgatacgatttgagagattcacagtaagattgtttgctcaagtacaggatgtaaaacacgagtcataagaccttctccaggtagttaaaatatagtttattcttttaagtgtagggatgcatgacttaactcatgcctggcatggccttaggtcctgtttgtaagttggtatcttactgccacagcgtccattctgtcagtcttatgatctctattttaacattaatgcttgttagttgttgtgtctaaactgcacaagggtattagtgaggcatgttcgacctcccttcccatcatggctgagaacgcagtttttaaggtttctggggccctcttggccaagaggggtccattcagttggctgtggtggggcttaggaggttatttttagtttataaccccctataactccctttccttagatgttcaatggaggaatgatagtgaggatttaataagataactcataaaattcttaaaacagtgcccacacacagtgtcagaacttagtaaacactggttactgtcattgttaggacaaatttgaaagctaaatttctgacattttaaatgtaaaaaacgagtatttatttgcatatacttatgttaccattctagatttctaacatttaaaatgcttctggcattttattataaaaataggacatgcttaattgtagtaactgggtaactgccaatatgtagagaagaaaataataatcatctgttatccctaactccccacttttccccataagaaaagctgttaaattttggtgtttacaacatttttatctttgcatctaaaaaacgacataattttggaatctcgtgtgttgttgtaacttgtgtatttattcagtaagtaatatatttgggcctgatgatgggttatggttgtaacctttcatattagcattgggaagaatctctaggggatgtgtgctctggaagatcagcagcttattcaccgcgtggatttggcttctgggattctcccatcaagaccaaatcctatagttattcagtcactcctccccagctcctgcagcaacaacaaataacacagctttgcagtctgggatgatggcagaggaaatgggagatgtgaggggccttcggcaggcggagtgcgtcaggtaaagcagatttccaagcctgcacgtgtacatgcgtgtgcgtctgtgattgtgtgggtgtgtgacagtgtaggggagccaggagcgagaggagaggacggcgatcgtaggggacacctgagagtcagaggcccgagggggctgggactcatgtcgaggtcggggaaggatgtaaaacccggacggacatcactgtaggccgcacctgctgagaggccagagctgcctccttgagagtgaagttgtttacagacaagagaagagatcttggcggacacatcacagctagccgcgaatcccgaagggtcagcagagcctagaaaggtaagtgggggtgggcagcatccccggaggggcctgcgaggcctgggggcggaagggagcgggcagtgcccgcactgggcaggggtgaaaccctctcgagagttggcccggacgcgtttcccgcgtccttcctcttgagggcccagtacccaggtggctcctcgttgtggcgtcacagaacagccgacaaaagtgatggatttcaggggccagcgacggcgaggtccaggtcagagagccggtgggcagccaggcacagaacccgctcaggccctgcccagtccccgccccctcgcttcccgagcagtgattggccgaagcggcccctcgttgctatgacggcaccagagtgctgccactggctccacctcgtcccttccgccccgcccctccgtattcccgggcggtgattggtcgaggtgcccttcccgttgctatgacagtacgcaaaggctgccagtggctcctcccgcttcgtccgcgtcgcctgtccccgctccccatcttccgggctgggagggaggcgggaccggccgcgtctccatggcgacgcgggacgcggcggtggaggcggttgctacccacytgctagaggcgctgcggctgtgatccaggctggggcgagaccatgtcggacctgggctcggaggagttggaggaggagggagagaatgatattggggtgagagctcctggtgagaaagggcttcccagggtgcgcagcggcgggggaacctcgaggttgggtttggagagtgaggaggcgcagaaaccagaggtctgagccacagctccccaggatccccggcagggacgaaggccacgccagacacacctgcgtgcgtcctggaagttgatggtgaaaagtgaaacgctgtgacgtctggttaccacatgccgcctcgttcttcccccacccccatcctgcctcccattaaaggcaaagatttcccagcggaaggctttggaagtttcctcctccctgtgttaattcccatcgaggcagttttctcggatgagcagatcatcccacgctgccatactgcccttgaataagtcatttctgtagctgagatttgctcccccggcatttagatgcatggaggatagttgcttcctggcagcctccaagaaatgctgaggaggccctgggctcaggagagggttcctgaagatattaccttataggcgtatcctcacatgtgctttcttcagtccccatctgaactgacccaggtctttggagttatttcctgagttaggcagcagagaggakaaagagggcacatccagcctgtgagctgggttctgtgtgggaatatttctatcacccagagagtagttcctccctactccagagagtgacctctccatggctgacagrtagggaacctcagccactatggtctgcatgcacagtacagagttgaggtactttcagaattaactgaaaaatctagcgactctgcagtggtgctgtcagtgcctgcccagacctttttgctagctctgggcactcatctcccagcttccgcctgatttgctactcaagctatcacctctgtgcgctggaactacctgcccagtatggagagccagaagtgcctgaaattcacatccggccagacagccagtagctagtgcaagaagcaggacaaagtctgcagtgcgattgatgcccccagagtccctgttggattaggccaagtctgggacttcacctgcaaaggcatccttccttagctgcctgccctttcatgtctacttccctgccctctttactactttctcccaggagagcacttaaaaaaatcaggccaggcgcggtggctcacacctgtaatcccagcactttgggaggccgaggtgggcagattgcctgagctcaggagtttgagaccagcctgggcaacacggtgaaaccctgtctctactaaaatacaaaaaattagccgggcatggtggcgggcacctgtaatcccagctactcgggaggctgaggcaggagaatggcttgaacccgggaggcagaggttgcagtgagccgagatcacgccactgcactccagcctgggcaacagagcgactctgtctcaaaaaaaaaaaaaaatcacttgttcagggtctgtttctaggtgaacccaacctgcaacacttgaccagcaagatttctagtttgtctcctcaaatggccccactgatttgtaactttttagtgcctataatttttaggttcagatcacatttggggtcattttaaaggatttctgtcttattcagccaccccagcggctcagtgttgggtgtattgggaagcctcttggatagaaggaggggacttttgtacattttgatgtaaactaaccctgaaacaaatctgtgaggtcgcagatttttaccttatattctaggcaggaattagtggtccaaacagtgctagaaaagggcaagaattgcacagacgtttatttctgaagtcctcaatgtagtgtgtcagtacttgtgttataataagtctatatacatccaattcaatttcttaattttaatttttaataaattttattatgtatatttaagaaatacagtgtgatgttatgagatacccatgttaaatcattactggatgctttcagcattttattatttactatattcactctatacccatgtattaggtgctaaggaacatttattttctgaaggataggaaaattgcaagctttgatcacattttttatttatttacttttaagatagacacataattgagcaggcatggtggctcatacctgtaattccagcactttgggaggccaaggatcgcttgagtccaggactttgagaccagccagggcaatatagtgagaccttgtctctacaaaaaaattttraaattagctgggaatggtggcgcatgcctatagtctcagctactcaggagtctgaggtggaaggatcactggagcctgggaggcggaggttgcagtgagctgagattgtgccactgcactctagccttggcaacagagtgaggccctgtctcaaaaacaaaaacaaaccacagatagatacataattattgcagcattgggtcatgagtgttcgaaccttaagtctcttgctaggggtcttaaaaataagataaacttaatcagcaagggagccctgtgtactcctcagtgccctccaacctgtcccttccatcggaaattccttgcagggcaaaggtctcttcaggccacaccccgccccagggatcatttgagggaagagttgcttctctctgggcatttgcctttgaaatcctggattactgaaggaagcaaacggggaggtatttgtgtggacttgaactgttctacccgcatgtactatttcaagcatgttcctactaagaacacagcttagagtatctagcatttttcacaaattggttaaccttgcttacagggtaaaggattatcacaatgaattgcaagctctgtgttggagggagggaaygaggcttccgccctggacatgtgctggggtgtggccttggtccagtgcctyatctagcccaggcgttgttacctacctcaactttaaggtgggaaaggtgggacaattgagtatagtgccgggggtttagcatagtgggatgactcaagggtatgatatttacaaaatgcttagcacctggttagcgcttaatgaatggtagctgtaattgtgtcaattttcattacccaggaatatgaggggggtcggaatgaggcaggcgaaaggcacggacgtgggagggcacggctacccaacggggacacctacgaagggagctacgaattcggtaaaagacatggccaggtcagaaccgttgacttgactggatggttttctctatttaatactctgttagcaaatgctacattcagcaatgatatgaatgatataatcaatgtgtttcaggggatctacaaatttaaaaatggtgctcgatatatcggagaatatgttagaaataaaaagcacggtcaaggcacttttatatatccagatggatccagatatgaaggtaaaatgttatcactaagcagattttcgtgttacagaagtttttctttctttatgactgaacttgtctgtgaatactgacatgtatgagaaagcttaaagttctccagttactcattcaacgaacacagatcgtgttactatattcacagtgttgatgcagaaataggaaagccttgtaattaattaactcactaatgaatctgtagtgggaaatctgtccctgtggccagcatgtccatgtcctgggagcagacaaaagggaggctcctgagtggacgcaggcctcgcagctggtggacccacggcttcagctgctctgcggcattcatcttcctgaacctgtctttgcattttccatttctgaccaaccccgccatctgacggatgtgttatttcttcagatcgagtgtttccttacatcagggcttcctgtctgggagtcttcctgccttgttaaactgacttttcctacctgtgccataagtccttacaggccaatgttatgtttgaggaggattctttttcctttatttccaagaacctccctgccgccccttgtgccgttgtcacctggtgtgaccacattagtgatatcccaaacctgggcagggggaccggcagggagcgtgttgtgagtcttcagaaagtgtatataaaattctgtgttctgggctttttgttttttccctaggaagaaagaaattgtctagttttcttcagatttccaaaaagatctgtgaccctaaccttggactctggtgacaataggtgtgagcttgcataggtgacttcacatctccttgcctcagtttctcatctgtagcatgaagattcaatggataaacacagggagacacctgcaaccttgcctgatccatagtgagcactcagtaactggggctaggactgtgatgtaccacttgtgacagcatcacttcttagtgaggaggacatattcttacaaagtgcgagctatagttgcttgctttgctcctagataaaataagaaccagtaggtgrttcttattttaatagatgtcagtgatgattctgtccaattctragaccaagatggagggttttaataccatccctgttagatagaaattgttttgttttgtttcataaatcccagaaggcttgctctataagaagcaccatctgctttttaaatcaactttaaacaatttaatttggggcttaatttaattctttccaaatccttatgcacctaatctcattcttgtyacttttgattttagtgtagatgttgatacaatttgaacaacacacacacacacgaagatatttaggataagggatttaaggaattttgaatatgaaggttaaaaatgggtaactgtttctctgacaccaaatgcatggattttccatgctatgtacttctccagtcttctgtgaacaccaactgagtttccaatgatgcaactccattctgacaccacccagagttagcacagaccccacaggttaagggctcagtttccaagactgccccacttcagatgtcaacctcaagttgtggatccggagggtacccacagttctacctgactcggctacaaattgggggttcctacaacaccctactcaggtttgataatgtgccatagcggctcataggactcaggaaagcactttactcatgtttactgtaaaggatattataaagaatatggatgaacagccagattcagaggtacagagggcaaggcctggaaggttcccaagcacaggagcttctgtccttgtggaggtggagtgcaccaccctcctggcacatgatatgtttatcaccccagaagctcaacaaatcttgctcaagagtttttacagagcttaatctctggccccttccttcttctttaccagagttggtgggtggggctggaggttctatccttcttatcacttggtctttctggtgttcagtcccatcttgaggccatcctgggcctcatttgcataagttcaggtgtggtcaaaagagtctcattttgaataacaaaaacatttctatcagtcaggaaatgtcaagggttttaggagctctgtgctgggaaccatgaataaagaccaatatttcttattatgccacactaacatataaagctcttctggtaacagttgggatttttgattctccagatggctttgtatcttaaagggtgcaagatttagccactacccagagatttcttctctgacaaaagcttaaataagtgtcttacttcatgaaggcagcaatggaaactgaggtcagaagttataatattaattataacatagtaagccaatactcttccaatcacaaaatctcagttaatgtatggctgagttattcataacagtgtatcttggctggctgccatcacaatgggccagaatggttttgtgcagggcagtgtgttcaacgtcaggaccctgtggcataaagtccagtaccctacctgtctcccagatggtcacacaagtccaattagggagtccaggagccagcagaggctatagtgctgcaggagaggagtggggagacggtcctgggtggcgggtgacttggatacaggcaggaaggccgaggtttttaggggtagtgggggatgagatggaggggagggtgggtgccagatgtgggggaggcctagaccccatgtactgatgctgagggttgggggtgtagggccaactgaggactctgaggttaagggggagaaagagcatccctattccctgctggccttgttgcctgtcaaacagaactcatcaaaacaaagaagtttaagaatgacattgtggagaaagaagaatgacatgataacttgaacctgggttttttggaagcccccgaatggcaggagctggaaaaaatgagcacttgactgttgggatgcttgtggagaagagagcatggtgttagacagactccaattttcatttcagtcttgctacccaccagctgtgggaccttggggaatgcatgcagtctctctgcttttcaggttctgcatctgtaaaaccatatttcagcgattacacataccaaatgctgtggcaagtgcacggaaccctgcccagggtctgacaccgagtgtttccccataagtgtgggctccttctctcctgtgtttggctgacccagcagtttagggagccaacttggcaagaccatgggccagcatggcaaaccagtgaccaaccagcatttgaggggggaggagcatcttggagagcttctcattttaaattgtcttcaatcccaagtgccagacaaactgctctacccaaggagcacctgctccacaccagccaactgacccacaaccagccaatcaaacagccaaccaatcaaccaaccagccaactgactagccaaccaagcaaccaatcaaccaaccaattaaccaaccaactgtctaaccaaccaaccaattagccaaccagccaaccaaccaaccaaccaaccaaccagccaaccagccaaccaaacagctaaccaatcaacaaaccagtcaactgactagccaaccaaccaaacaaccaaygaaccagccaaccaaacagccaaccaatcaaccaaccagccaactgactagccaaccacccagccaaccagttaaccaaccaaccagccagccaaccaaccaaccaaccaatcggttagccaactaaccaaccagccaaccagccaaccaaccaaccaaccagttaaccaacaaatmaaccaaccaaccaaccaaccaaccaactgggagttactcctgagaagaaatatagttggaaaaaacctcagttgacaagttcaagaatgatcagaaagtataggattggggtagaaagactttaaaaaaaaaattaagtgcaaatttaaagccacaataataaagtttacaaatgtcactcacctcaaaaaaggaaacttgacttatagctgttagagatgtgcctcagcaggtgacttttctctgaattaccttctctatttgtgcagggtccctgtggtggcattacaaaatgctgggccgagcctcttaacaggttttttaagtagattgggactttaaaaaattttgctcaccgtcctcttggtgcaaaatttagtgtcttttgcaacttaactgttctcttttatttttgaaatttttctgcaaaatatgtaatatatttttctcaccatgacaccctggagatcctctgacatggccaagagaggagggatgtaataattttgtcatgaagttttgttgggaagaaaccaaatgatgtacctgtttcagctgaggtctctatgccccagggctgtgctggaaccccctcatagtagctcacaaaaacccattctgtgcatctcttcccagctccatgtgtagcttgaaattggccgcggtgtgagtatttacaccacagaacctggcaaatgttacaaatccaggcacatcactgccccttaagacccagacaaatccctctaggtatttgcacatcctcatggttaatttaggttcagggacctgaagtattttttactgaattatctcaatttggggatcttcatctctcttgttcacattgttcctgtcacacatcacatcatgggacctagtcctcttccttaattgttagcagttgccaccttccctctctccatgaatttttggtaagcctgctcttttctgaatgacttacccactttttgaaattgtgccatgcagcttttcgtgctgccttccctgtcctcagctgctgctcaggtgccaaccttccatcctcaggctggtgctcgygccctggggacatgcactgtcctttgtacagctcttcgttcatctcacaaagtgcccaggacattgtaggtgctgagtaaataatgggatgattgaggaaataaatatgtagaagttccttctgcagataaattttggggttattcacataaacaaatattacttgaataattagcattttcttagcctattgggtattctttatcttcatgtggaagtgggtccagtttttgtgtaagccagaagcttatgtaagttttgagaacctctttaaaaaaaagaaaatataaagttggtataaaagtgaattttcatttgcaatgataaatcaaaataagttaaaaatttaaaaataccacaaacatcacagaatctaagtagcctgagttttaatgtctgacatacttctagaatagcttttctctacctttgttagctaatactctttgaatgcttctccatatggcaaccattttgtaatgttttctatagagagaatagaaatataattccttcttttctctttgatcaacaaattgatcaacatttgctttttattattcatagtctcaaaacatatcatttagcttaatgacttggtgtaatatgcacgtttttaagagcagtcacctttgggagacctctattaagtttctttcctaagtgagctgtaagatttgaggacgttttgagttttctagtgcagggattcatactgtggttgacaaaagtagtttgcagttgtccacatcatggagtggtattatgaattttatgatatccttgccaatttcagtactgcctaccaagyctataaggacttagcagaagccgtatggaggtgaggaggtgagggaagagttcaaacagaggcatggcaccagcggatggagctggtgtgcagctggggttagagtggcatgttggagtcagatgattgggtgggagatagactgaaatgctgccaggtggctgaggatagatggtcaagccctggagttgttgctggatctctaaacatttgcaaggtaaatgaagtgtggtgttaggatcactggcaatgggtcagacaaccttggtttgtctccctcctcgttgcatcttcgtggtgcctctgactaacctgtgaaatgtgcttgtcagtacatgcaggtggctgtggcccacatccatacacctcactctgtaccccgtgaactcctgactcagccctctcttagcccactgtccaccgtggctcagcacctatgccatctggcacaaaaggaaggggtggagggatgtcagagtggaaacagatagcagccttggtcggtgctgttaaaaatctctcttctgcaggatttcctgagcagaaggggcctgtgtgtgcatgggcttcatttgcttcacaacacatctgcctttgccatggttaacaatttgaagacatggtacagggcatcgatcccttcttctcacctgggcttgcctttgtgttgttcctttcaggagagtgggcaaatgacctgcggcacggccatggcgtatactactacatcaataatgacacctacactggagagtggtttgctcatcaaaggttcggtttctatcttgggtcttaacgggatttgcttatgtaatgagaacatgatgtctgcagattgtttacacttactgaggaacagaatcataacaaaagcccagttaccaactctgccaggcaggtscaatctttctatggctttgaggcaaggatgcctttctgtgcaagtgtagactcaagtatctgacatctgcacctcagttggggcagagcacgtgagtctttcacccaagagtcccagggagtggagggcacagaagagccactgggggacctgagccacagctcccactagctctgcctcttccctggggaaagcagctgacacacaggaggcttgcctctgtccagctggcctgtcctctgtgcctctggcaatgtcctgtgcttggggcacactgagcaaggggcaccttctgactggacacagatatagaagctacatcgcttgtgagcctgcaacagcctgggcctccctcaatgtcaatgtctgtgttttaaacctgggagatttttcactgtgctggaacgaaataccatgttccccttgtcttaaccaggcatgggcaaggcacctatttatacgcrgagacgggcagtaagtatgttggcacctgggtgaacggacagcaggagggcacggccgagctcattcacctgaaccacaggtaccagggcaagttcttgaacaaaaatgtaagtccatgggaagtgacatttgccaatgaagtacaaaataaccccctctggcagcctgtgcaaatgtgtgaccagagaataccaaaaactcagagaaaactgagtccggcctattcaaatgtggagaacaggacagctgtgccattctctgagcctctggtacccacagagcacagaattgggggaagggagggattggcccgtttctctggatctcagtacaaattcccactgtctttcagcggggacctgttgcattgttatataacacgagagggcatctgaacctcttgtgtgtattccttctcatgggtaaatcagataccaaatatctatttcctgcaattgagcatagaggtgtttgggttttgtttccctggaaggggaggtgcgacatccctggggaggaagacccccagctccctcctcatgctacaggccagcctgcrtgctcctagttgtggtgggaattaaggctgccaagggcctggccctgcgtctggaggcttgccagcttctagcacccatggtgggccgtttctgtttggaagactcggtggttcctcttgcccttattgtacagagaaaccttgaataattcagaagctaatactcaggccatcgtggtagctttgatcaggggttgagcagaaactttccctgaagagagaatttgcggagcaaattgatggtgttagaagttgacagagggaatgtttagctgatacaacgaagtctcttcagactctcttagaacccagttttcatttacgtataattcatgccctaaccacagattttacttttagtyttcatcaaaacagcacattcccctcaaacccatacattgtttatataattcccagcaaactttctgtgggtctttttggaggagatgggaaggtggttgcagaggaagagaatttgatgaaaatgaatctggaagaatcaatcagcttgtccagcctaaaccagtctgaaaaatcggggtaaaaatggaggctttgttttgctagttagtaaaaaactttaaattatacaaataatacacaagtacattccaattgtaaagcatttaaacactaggatcctgccccaccaccctgggcccaatccttccacactatttctgtgtgtcatgtaagcacattctaatacagtcatctgacacagaattattgtttgggggttttaattacataattaggatcatactgtgtcaggatacaaaaatatacataaagatacatatttgtcattttgcacatttgggactattgtgtaggttagataatggaattgtgaaacctttgaggattggcatttagaatcacaatcggtagtgcccattttcctaaaaagtggtgtcagtttatactcttgccaatagaatatgagtctgtttatcatatattctcatcgatgttggatattctcagtctttaatgttgtttttgttcttttccaatcttatgggtaaaaaatgtcatctcattgttttaatgtgtacttccctgattactagtgaggtcaaacatcttgtcacatgtttattgctggtttgtgtttcttcctcagaaaattccctgtacatgtccttgtggacaagttatcaataccacaaaacttcaataattaaaacagtgtgataccaggatacacacacacacacacaccaatgaagcaaattaggaagtccagagacagttcccagtatataaaataatttcacacacaataagcgtgtcaaattaacaaagggatgatgggaggagtcaagacatagtgctaggaacacttgacaattatttgggaggaaaataatagttttgccttcacacagatgaagatactttctagaagaagtaaagatttaaatgtaccctaggaaatatagaaaaaaaatgtagatgaatattaaccttgaaatgaggaaagagaactttctaaacagaaatagaaaggaaaaaccaataggtttagctttataaaaataacttcttatagattagaaaatgctgtaaagaaaatctaagagatgactgttaaatggggagagaatatttgcaacatttaatatataaagtgttttatcaatcaatgtgatttaaatggctaaaaatcttgaaaaaaatgcaggcttactaacaactgaaatgaagtgaattaaaattgtgagaccctgttgttttatataaaaaaamatgtaaaaatagaccatttttacactcctaaaatcaagagtttgaggatctgggactcttaagtgcagttatgggaatgaaacgattagagcctcatctaatcaaagcacatgtatgcttttgtccagaaattctgagaatttaaggatggtatcaaaagcgtacataaagttttaactcagagtacgtttgctggagcgttctttgtaaaaaaaaaaaaaaaatcagtatcccaaataccaacaatagtaactgagtaaaataggttgcaatccatagatgaaataaagtaccaggtggcaactgttattaggaaagaatatttgtaaatacgggaagtagttcatgccatatttctcagtaaaaatagagtatgagttagtatgtataattatgatcagatttttatttaaccatgtatactagaagcaaagttacaaagaatgcatcaaaatattagtagtagttccatcggtagctagtttgcctatggatactgattcactgaggttttctgaaaatgaatacatcacttttataaaaaagtaaaatgtggttaaagtttccaaaagtaaacaaaacagggcatataagttccaatcccatcagccacgarttcacaaaagcattccttaatccatgttacactttacccaatttggtgatttgaggtgggtattgtggtggtgacatttgtattttgtattttctgctgggtgttgacacttaagaatggtttctctttgctcgtagcctgttggccctggaaagtatgtatttgatgttgggtgtgaacaacatggtgaatatcgtttaacagatatggtaagttgcggagcatgtagggttttgttacattaacagggaagtagctgctcaaaaatattgatcctgcaaggttggaggtgattcgcctaaaagttatgccaactcttaggcactttcacattttcattttccttatctgcatgtgttagtacagaactaaattgccagaagcaaacaatatcatttcccatttattgcagaactctagactttgttgatagataccgtttttgttgatagaaactaatcctggcagggcacaatggctcacgcctgtaatcccagcactttgggaggccgaagcggtggattgctttaggtcaggagtttgagaccagactggccaacgtgatgaatccctgtctccgctaaaaatacaaaaattagctgggcatggtggcgcatgcctgtaatcccagctactcaggaggctgaggcaggagaatcgcttaaacctgggcggcggagtttgcagtgagccaagatcacgccactgcactccagcctgggcgacagagtgagactctgtctcaaaaacaaacaaacaaacaaccaataaataaaaaactaatcctgagtgggagggttctagacagtgttaggtcctgcaagtgaaaactgaatctgtaactggtgttgccacagtttgtccagtgactgttagcttgtccgttgtgcagcatgctcctctgaacgtgccgttggtaagtctttctcttgttttttcctttccaatatctaacattaatattaacactacattgacattccctggttaatagtaaagctagtcagctaatattgccgttataaggcatcgagatgcgtatgtgtgttgaggtgggaatatatgtgttcctattcctctcattattaatgtctgatcaatccctctagataattagcaattcagcaacatttcctgaccctggtactggttttgatccttttgacttatttgtttagrtgaggtcattctcactgtaagaagttttgagttttaaggaggagtgtggaatcacgcttttgtttgttttttggtctctgaagttgttgaggtgtcccctcctagtgagttaagaatatattatcgtacacaaactctcccatgtctgcatactttctttctgaagaaagccggggaacggcttgtttgggtctaccatcacatcaatgccctttcaacctgggttagtcctttttgtgctgctataaaggaattcctgaagctgggtagattataaagaagagaggtttatttggttcacagttctgcaggctgtacaagaagcatggcacccgcaactgcctggcctctggtgaggtctcaggaagcttccactcatgatggaaggtgaaggggagctggtaccatagctcaaaagaggaggaaaagaggggaggaggtgccaggtatatatatatatatttttaacaaccagttcttgtgtgaactaatagagcaagaactcactcatcaccacagggaaggcaccaaaccattcatgagggatctgcccccgtgacccaaacacctcccaccaggccccacctccaaccccgggggtcacatttcaacatgcgatttgaaggggacaaacacccaaactatgtcacaacctgagccaagtcacctcgttttgtttttttgttgctgtgtccctcgtcaagcccttggcatcacccagaggccctgctttaaaccgactcctcgtcaccttgggctcaggtgtgaggctgtggaaagctatccttggtcacaggaggtagaagccacactgtggggagcttggaaggctgcgggagatcctgtgcatgagggcctgtcccgcacctgctctgtgccgcccactgctgtctctacctaatgctccatcctttcaccccaagggccctggccttgaatcctaagtctaaactcatcactaatttttcaattcaatgctcttcaatgctctccagacaggttttttttttttttttttttttttttgagatggagtttcgctcttgttgcccaggctggagtgcaatggcgtgatctcggctcamcgcaaactccacctcccgggttcaagcgattctcctgtctcagcctcccgagtagctgggattacaggcatgtgccaccacgcccagctaattttgtatttttagtagagacggggtttctccatattggtcaggctggtctcaaactttcgacctcagatgatccactgcctcagcctcccaaagtggtgggactataggcgtaagccactgcgcccagccctccagacagttttttaacttttctcatttttcttcctagagtttgttagattctaaaaccaaagggagtctttgaatctttatcccttaacctcccatgatcaagtgactgtccgtgctccgttgctgcttcccaagtggccacagtctggacatccccggggctctcggccctgacctcagccaccctcttttcctgattcccgctcctgtgatattctactttctgcacatcactctggccatggttatttagtttccccaaacagcccatggttgctcatggtccaccttcttggctgaccagaatcctgtgtggcctcacagtgatctgtcttccttgcctcttctcctgctttgctccagctaaaaggaaccactggctaggggcaggtccctagaaaaccagaaaatgaaatggccaaaatgcttgattttgttgctaagtaagaggccctacctcctctgagcacgaattcttcatggaccgcagggtgctctagtctgggtggaaggcagcttcctgtaagtcacctgcatctaacaaaacgtagaggaatttgacatactgtcctcccccgaggttccacttcatttakgtgtgtgtgtgtgtgtgtgtgtgtgtgtgtgtgtaacctcctacacacatagtcagaagcctaagaaagacagtcggctttaggatttgattgtgacagggaggtatttagtattttgctgggatttccatggggttggacacctctcatctgttccctgaaggaacctattggttaaattgatatcttgtcagcactggtaataactgtttagggttactggtgattgagcaagtttttacatttgtgtagtgataaaaataaagcccatcttattaagtgctttgcagctttagactctactggaaaaagttcctagaagtcagtatttcaggatgatgagaagaaggtagaaggagcatcagtaacatctaagagagaattactgatataagccccaagtcctgttgctgtttaggaaaaaccacccatgaaataatgcagcaacaacctgagggctttgtggaaggcctcccactgtgctgtggggatggattaggatggtggtggaacagaagggcctccgtgttctctctccctagtaaggggaatgtatcccttctagagtagggcttgccaagctgcagcccacggctcactccctgtttctttttaaattatggttttatatgtacgtttatagagtttgaaatttgccattttaaagcatgctttcagtggcattcagtacgttcagtgttgtgcagctgtgagaatgatgcatttctggagcttgtccgttatcccagacagaaactctgtacctattaagcaacaactccccattcgacctcccccagcccctgatagcttttaatctactttctttctctatgaatttgcctattctagatgtcgcatatagatgaattcattctgtatttgtccttttgtgtctggcttctttcatttagcacgacgttttcaaggttcttgcttatccatttgtctgttgatggacaattgagttgcttccacattttagctattatgaataatgctgcagtgaacattggtgtgcaagcatctggtcgaatctctgttttcagttcctttggttatataccgaggagtggaattgctgggtcatatggtgatgctgtttcgctttttgaagaactgtcaaatgttttctacagtagctgcagcattttacgttcccaccagcaatgtgaaagggttccacctcttggttttatacataaagtggcgtgcagttcccaaactagtgctgtcagcttcacctgggaatctgttaggaatgcagcttattggacgctatcccagacctgccgaatctgaaactctgggggtggggctagcaatctgtcttttaatgctttctgggtgattctgatctaagtcaagtttgaggaccctgtcctgcagcattggtgtcacccttcatgggtggccatattcaaacactctgagaccaaaatagagagtaattgatttcccagtgactcagtggaagaggcaggtgtctgcccctctctgtcatcggtattatcacctatgtggcagcgaagtgttccatagtcatagtgctgatgctcagatctttggaattttgtgatagtcacaaaactgagaagtaggcaaatatgcttggcaaaattggcacatgttggctgctcaccattgtcggaattgtacattttttattacaaagtgttccatgttcagacttgatgaactctcattctgctttccttgaattttatttttccccataatccttgacacttgagctttygcgtttatgcaaatccatatcatatggacatcttaggaacttcttaggcctaagcctaaaacaaatggctgtttcttttattatttatataaagaataatataaataattatgtttctactaagctcaatagacatataattatataatacacgattttttatattagagttgcaaaatgtggccgaacaattgaaaagaccacttactcctggtcactcagttctggccacttagtcctggccatgtcttagctattgcaggcgactgcgacatgctcatctgaaagccttttgtggcacccattataaagctcgctggcccagcattgctctggagaccttattcctcaccctggctctttcaagatccattctcaaccctgagattataccatggatagtcagcaactggtctgattcctgagtgacgtcctaaaaaggctgaaacacaagccaaaacctgtctttcaaaacttgtccttcctccctcacttttaatattccagaccaagatgacacaaatgttggtaaatgtacatttttgcacttaaaataggaaagaggagaagaggaagaggaggaagaattagtaactgttgttccaaaatggaaagctacccaaatcactgaattggccctgtggacaccaactctccccaaaaagccgacctctacggatggacctggccaagacgctccaggagctgagagtgtggggcacccccgggctgtggggtggagggggcagagggtgtggggcacccccgggctgtgggacagagggtgtggggcatccccgggctgtggggtggaggggtcagagggtgtggggcatccccgggctgtggggtggagggggcagagggtgtggggcatccccgggctgtggagtggagggggcagagggtgtggggcatccccgggctgtggggtggagggggcagagggtgtggggcacccccgggctgtgggacagagggtgtggggcatcccccgggctgtgggacagagggtgtggggcatccccaggctgtgggatggagggtgtgggcgcctttgggctgtgggagttgtggacatcctgwtttcaggccaggtgtggttggactctctgaaaatcagatgctgggtcagttgagtgtgcgggatgttattagggagagcctttgggattggaggacactcccggagagcggaggggagaggaaagaaacagagttgattggacagaggcggaggtgtggcctccacaaccttgcttcattccatggggagcactgtggcgtctcggggacccttatcccctcacctaggtcagtgagtgaatgtgggtgtgaccccgggctggcactgacagcagctgaggggacagcccttccctgaagaagggtccgtgtggcacctccatgtccaacccagtggtctttctggaagtccttaatgtgctggggaaagttgaaggtggctaccccgggtgagatcccttccatggcaagcggaggaaagccaactccgattggcctccgtgaaagaatactcatgctgctaagaatttcttggctcatgtgactgggaagctccgggacagcccccagaatggccgggcagcctctgccctctgtcccagctctcctctctgctggctcccctggctggcactctcaggaaccccaggggacttctctttctcaagagtctcatcaacaccctcaggaatgaaagttatcagactacctgctcccatccccaagccactgactacagtggggactgggctgctcccctggccaggcctaggctgggctgggtggatgttgagatggggaacatgaggtgctgccagtgggagggggagggtgggggcacggcagcccaggggacagctgccctgcacaggtctgcaggctccatttttcccaggaactcaggcttctgacttgtgttttatctcaggtgcaggagaacccggggaggaggcccaggctctgctggagggcttcgagggtgagatggacatgaggcctggagatgaagatgcagacgtcctccgggaagagagccgggagtatgaccaggaggagttccgctatgacatggatgagggtgaggtccctgcgcagggaagtggggcgagggcccgcacttaggggccacgaacagtgggattccccttcccttcaccaaggcctgccttcagctgggccccagggactcgaggaaggcttagggggccccctgtgagcgctcactggagccatctcagaacgttgctccctggcaggccctcctgcaagcctggctgcagtgggagaggcctgggtgtgcagcggtgcccatgcgcgttgtcacaggaggaccgaccccaggctggagagccctgtcagacatgcagagcctggctttcttctgttgcatgattttttttttttttttgagatggagtcttgctgtgtcacccaggctggagtacagtggtgcgatcttggctcactgcaacctccacctcactggttcaagcaattcccctgcctcagcatcccaagtagctgggattacaggtgcatgccaccatgcccggctaatttttttgtatttttagtagaggtgggtttcaccgtgttggacagactggtctcaaactcctgacctcacacaggaggcccgcctcggcctcccaaagtgctgggatttgcatgatttttagcagggctgactaacaggagtatggtttcagactagtggtgtcgggaactagctctttttcaatgggtttggatgtaagattaatctagaaacttctgcctctgccagctcatagggcagggatttgacctcagttctgactgactgaagcctcaggctcctggaatctttaaaaatctttccccaagtgcttgtgggcacttgcagaaagtctggagagaggactcgcttcccttaacgcacttttcacatctgactgaaagagggtgtcgtgcttgtgagggaaagggccatctgggaacagcctgggcacggcggcctcaggcacggggtctgcagtcccattccacttagtttgtctctgttgtaaattaagaatatacttcccattcctttgaaaataatacctgaaataatgaaatcacataaagcagttttctcttagatgcttgaagcacacatagactttcgtgatcggtaattcccctgagcgctggcatagactttcgtgatcggtaattcccctgagcgctgtagcaatgcacccagtgacgcagtgctgaggtgggacgtggggtcaggtggaaacctggctttacaagtgagcatcgtctctgcttctctgacttgcacagggagggtggatagagtgagccctggtaggtagggagtccacaggattctgttaggactgagtggctagagtatgcacagtgttacagcagcatctagctgtgcccacagatgtcagtccttagtcactgtggagcacagctggagggggagacactgggtttgataggcagtgtgggagtgaggggctgggctctcgccctctagcacctaatgggaagctggaataaaggaatcagtgagttccctgcagtgacagggacgtgttaccatgtacccaggagaggtgatgactcacctggggcaggaccaggaaactctgggttagctgggagggaggtggcaaggaatgggtgaaaccaggaaggaaattccaggcagagagcagagtctgacagcagaagagtgtgggggtggggaggtggcccctttcccttggaaccagatggcctttgaacttgatcctgagcccagtaggcgggacctctgggagctgtggggattgcctgtatcaggcttgctctctgagcttctctggggcaatgaggatgggtgccctggagccaggcaaggcaggaggccccagaaacttggtgggggagataacggaggggatggagcaggaggaatcctgaaaaccggactgggagagatggggccgagtggacgatgcccagtaccagcgggcgtctgagactgtgggttcatgcaccagccttggacagagggaacacccccttaactcagtggttttggggctccaggggacatttggcaatgtctggagacttgggaggctggtgagggaggtgctgctggcatcttcctgggtggaggccggggacggtgctgaataccctgcagggcacagaacagcccccagcaaagggtcacccaggccacagtgtcaggrgggccctaagtgaaaagggagtaatacaaaataggcttagtcggcagaacatttaycaaaataatgcaagttcagcatgtattcatcatgaatcccacattacattggagatttaccctgctaatttcttctttaatatacccaacagtgaaagttatagagtttaattaataataaaaaatagctctacctttcacaaaacatttaaatatagcgtcttataagaatgtggcaaatttctgctttttttttttttttttttaagatggaatcttgctctgttgctcaggctgaagtgcaatggcgtgacctcggctcactgaaacctctgccacggggttcaagcgattctcttgcctcagcctcccaagtaactgggttgacaggcatgtaccaccatgcccagctaatttttgtatttttagttgagacggggtttcaccatgttggccgggctggtctcraactcctgacctcaagtgatccgcctgccttggcctcccaaagtgctgggattacaggcatgagccactgcgcccggcctgcttttcttttaaattaatagccaagcaattacatgttttagccacaaagctggctgttttggacaggtgtgcaggcataagagaattactgatgttacatggatagtcttgtcttagcatttactttgagtaygtattttgcttattttatgtcgggtaccaaaagaaaaaactgttgaagtgcatatgagataaaatttaacattcaatttttgactgatgaatgcttaatagttacaataatttttttcggcaaaagatctgttagtgaataaaggctttaaaaatagaacaaagtaaatatgagatatactcatgtttctcttttcttttcaggaaacattaattctgaagaagaagaaactagacagtcagacctccaggactaagatgaagtgagccgagaggagatcgtatcataagaatgcttctgtcgttagcygggtgcagtgctgtgtgtatctagttccagctacttgagaggctgaggcaggaggattgcttgagtccagaaagtggcagttgcagtgagtggagatcgygccactgctctccagcctgggtggcagarcgagaccctgtctcaaaaaataaacaaaaacaaaatgcttctgtcagttaacaatctttattagagggtttttagtctttctttctcagctgtatgttaagttgrttgacaaatgcaaataaacgtctttattatcctttctttctgaaatagcctctgcttcaagttctgtaaactgaaggttaccacgtggttttgccatggtttttcagtggtgtcttctccttggatagagaaaactgtaaatctgcgggagacggtgaatggaagtttggcttctggctgagctgggagagtagttctgtacccaaacccctctctcagatttcccacaagggaggtaggaagcacttagaacatgaggattgctgtgtgcaatgctcctcgaatgcagtgtgatgggtacacggccggcttgggtaggagaccgcccgctgccccgcagggttccctcccactccttcgcttctccatgtggagcccaggcctactgtgggggccctgcaggtggctggggagaagggctgcccacaggccaggctttggcctgttttgcacacgcttccgtttcttagtgtactggaggctgccacctgcacctcattcttatttcttgaggactgtctcagactctgcctctcctttctctccccaatgccaggccacccccttgttcctgggcagataagcgaggacctcccaggggagcccgactccccatcgtgcatggctctcatggctctgcttcatgtatcctcccctcccctgggttactcagagggcaagtgtcttcagttcaccccaaaatgtcctttagagttagtttaacaaatgtcaaggacattttcagttcatcccagacatcttcagttcaccccgaaacagttcaccccagacactatcagttcaccccaaaatgtcctctagagacataatctgggggctatgtctctaaacagggggcccctggagacaaaagtggctccttcttggatgctaacccaccatgttcacgtctgatcggccccagtcccttgaatgcctcctggtgtccgctttatctactgtctctagtgtaagaacctgtcaaccttgacgttgccgcacaaattagaggccacagtgcacatggcattcttgctgtcctggagagttgcctttgtcttgctggagcgtgtacgccctttccctgcagtatataagccccaggtctggggagtaacagtgcagagagccacctgtcctgtggccgcccagggccacgcttccatgtgtaagttccccaatatatcaaccaatatccacaaactggatttgtctgccttctcctttggtttcttggctcctttggcatttggggtctactttgcatacacggccctttcatggagcagggcctctttaagacaaagcacacaagccgagtatagtggcgcgagcctgtagtcccagctacgtgagaggctgcagccggaggaccatttgagcccaggagtttgagtctagcctgggcaaaatagtgatacccatctctaaagaaatacatttttttttgagatggagttttactcttgttgcccaggctggagtgcagtggcgtgatcttggctcactgcaacctccgcctcccagtttcaaatgtttctcctgcctcagcctcccgagtagctgggattacaggcgcctgccaccacgcctggctaatttttgtaattttagtagaggcagggtttctccatgttggtcaggctggtctcgaactcctgacctcaggtgatctgcccgcctcggcctcccaaagtgctgggattataggcgtgagccactgtgcccagcctaaagaaatacatttaaaaaaaatctaaaaaagaaagcacatacagcattatgaatataaaattagattaaaacaaatgtttatttagaataggaaaataaattataataaaattacaaatgaaaagtggataagcagcacaaaatctagaaaactatcagaatattgttatgaattcactgcttaatacaactctgtaatacgtcttttcctgcatttttttccagcatactctttgattgcctctttttacaactattttgtaatattttctatagggatattagcaagataattacactctttctttagtgtggtttgttcattactgataattgaggggcataaaacattcatcttcacatacaaacataacaccgtgcacgaaactgctacaggattgcaaatgacaaacaggtgtgctgatgaatccaattgcatggattcttatccaaaattagatatgacaggggcagggcactgtggcttacttctgtaatcccaccactttgggaggccgaggtggatggatcacttgaggtcaggagttccagaccagcctggccaacatggtgaaaccctgtctctactaaaagtacaaaaattagccaggagttgtggcatgcgcctataatcccaggtactcgggaggctgaggcaggagaatcgcttgaatctgggaggcggaggttgcagtgagctgagatcgtgccactgcactctagcctgggtgacagagcgagactcaatctcaaaaaaaaaaaaaaattatatatgatgggctggtcatggtggtttacttctgtaatcctagcactttggaaggctgagtggaggattacttgagcaccaggagttcaagaccagctgggcaacatagcaagaccccatctctacaaaaaatacaaagattagcctggtattctggctactcaggaggctgaggcaggatgatcacttgagcccaggaggttgaggctgtagtgagctgtgatcgcaccactgcactccagcctgggcaatagagttgagacccagtctcaaaaaaagaaaaaaatatatatgatatatcattacgcccctgacaggagatattctggttagaagcaggcatcagcgcactcttacagttttccacttctgatgattgaaatgatctccatagcccagcttctgactcagtgcactttgaacctaatttcttctgcactcccacacgcaatggtgctggagctggaggacaggttcatactgggatttgaagtttgaccctgcacttacgtgtctcaattctaggtaagtagcaaaatgagtgttagaagtatttctggaagtgatactactccaggacaggtggcagaaactgtactacatatgaaaattactgcaaaccagtggcatacacaaatactctctggaacccaaaccaccacatccacccttgattcaattcaattagtgcccctgaaacagattctaaaagtgcctgtggccacttcaatgcccttccacctgaggggacacatgtctgattgaaattagaggggaaagtggcagaggcacgattatggttaaaatccttcactaatgcaaaatagatgaaacacagggccaggtggacaccctgtctggaccttgcaaggggcctgtgcctgtgcagagtctgaagctggaggctgtcagcttcatggaaatccctgcaccccattcttttcattcagtgcagtccctttcatgttgctggctttgaagggactgggcgggctgcctggcagaatatctcatcttctgggcttgtctgggctctcttgttctttaagctctgggcacttcttactgccaaagaagctggagctaaaggtttggtggattcacggtaatgttcttagctggaattcacatttgtggtgttacagacttcctccttcattacagcctaaggcatagcctatctggttgatccactgttagttaaccccagataacgattagggcctgatatctttgcggtcatgattcagcccactacaagtatggtttgcgagatggtgtttttccaactccactgttccttctgaatttattaggctgtaaatcatggatttatttggttcccatgaaatgcagctcctcctagaaaaacagaataaaacctttcattctttcccttgtatgaccaattttataagcgaggtgttagtttagcagatgcttcaaaggtgacaagtccctttgttctggatcttttttgcatagtcaccatgggcttgtggatgtcactgagtcaatgcatttcaatccactccaatcacttttctttatgatgcagagacagacacaactttggccagtggtagcttcttcatgccactgttttgtccggttgacaagaccccattggtccttgaaaacttcagtactttttagtgtttttgatgttttgtaatttatttttgtataattttaaacttaaagaaaacttgcaagaatagagaatgaaactcctctatactccttaactagactcagcaattatttgcgttttgccccatttgttttatcatcttgctgagagagagagagagagacagagggagaatagcatgtagagaaggtataaatacacggtagacatacaccatttcttcacaaccttttgagtatgataggcctatttcagtatctattttgtaaaaacaagatattatatagagtataattatcaaattaagaaatttcacattgatataatttttgtaatccatagtgcatattcacattgtaccagttgcccccatcatgtcctttttagctaatattaatgacactgggcattcattcatgtacttattgaatatttgtatatcttcctttgggaaatgcctgttcaaatatgtttcaagtttgtattgggctgttttgttctttggattgtagaaatcctctacattttctgtcctttgtcagaagcaaggttttgcttaatttgtggctcaacaacaaactgttgctgttttctcaactgcgtccttgatgagaagtttgaatattgtttgtttgttttaaaaagaccttggtattccactctgagtttcaattaggacagctgggagcggtggagagtcggagttgggggaagagctcagcccagtggctggaagtctagtgcacttggtttttgtatggggaatgctcgctttccattttgctgggaagacgtgcagatgagggcttctgtcaccaaaggctgaagctctgatgatctaatttgggcagagtttacccacaggatttgaggctcctccttgtggccttttctgtcctgggtgctcacttgctttttatcagctgcggctgccatgagcttagtctgctggctctgcagaccagaaagcctgcggttttctgttttcctttggtcatttgtcatggctacgaccgccaccaccacagccttcatgacagaagctccctgctgccctcctttcttccaagtgtcaacgcccttccagaattggtttcatcttattcactctccgctggcatcaggcagttattttttgtaatttctccagcgtggacagctgctgtctgcagaagggttggctctggcaggagctgaccagatatggagactgcagcatgtgactgactctgggtagagaaaagtttcgatcaccaaatgtctttatcataagctgaaatattaagatattcatcttgatctcaagatgtgcgtgattcctatttcaggtatctctaccaccttgggctgttcccggcctttgccagctctcttgagtctccttggcgtcagcatcctcagagcaggcccccggccagtgtaatcgtccgatgggctcttcctgtccactgcacagacaaaatcaatttaccgaggccacggcattgcagtagagaagaggtgtcactgacacgaggctggcccacgcagaagaactggagttactactcaaatcattctccccaaagccttggacactagggtttttatggacagtttggtgggcaggaggctagggaatgggtgctgcttattggttaggcatgaaatcacaggggtgcagaaaatggtccacatgtactgagtctgcatctgggtggggccacaagaccggttgagtcatgagtcccagatccccaaagggtcagtctggaaaaataataataattaaaaaaaaaaacacttaggttttacaatagtgatgttatttatagaagcaattgggaaaaatcacaaatccccatatggcccctggaaagaagggattatagaaactatgcctacattt

SEQ ID NO: 94549 - DNA, 230695 bp, Homo sapiens
tgggttctctgaagacataattcagtcaattcctattcagtttatttgccaagttccttacatccagctttaatctaactatttcttcccagcccaatgagccagatttcccatttattctgggttggagaaaaccttgtcctaagagccccgaaagtcatggaggaaaacactatctcccaaaataaagaaactctaactgactgtaattatagctgccattgcactcaatgataggcacaggttcccagacattcctcatgactgcagggtacatcacagaaatgtgctcactgaccaggatgcttgactcaggcatctgttctttctgtcccctgagattcaagtcagccagtcttcttgaatcagagaggcttgtatcagggtttccttcagctagatgtttcaaatacacaaagattctggtagaaaagacactactaaagctagagaaagatacttgagcctagatggccagtccacagatattcatagaatatttattgtgtagtaagcatagtgccatgtgctggtcatataactatttgctcatgggatttatacttcagcggacaggtcctctcccagggtttttcctgtgcacttttatctaattgtctccatctgatatctgcaatgaacttgatcaactctcctttcttatttatattccttactattttcactttattccagaagccaggtagcagaatatagtagaaaaccattaattcatggctgagctactctgaagaataggttagtagtatctcattttataggtgaggaactgagtttcgcggaggagaaatgagtttcccagcacgtgcagctaaatagacccccattcccatttgggcaaaaaagaaaaaaaatagttgatacattatatgggtagcttcttcctgctgtgcttattttcttaggttcacgctctgatcctgctggagccctatgtacaggtaaatgacaagtgcggtgagaatgtggctagaattgtctagaaacttttgtgctcagagtggtcaggggcagccrggacaaaaatctgttcaagattcaaattcaaagtttcttcttagcaactaaaacagcaaagttaaggattcctgctttaccttgtttctctcttcttgtttggatgagtataaggatgcgctaaaggaggcaaacagtagtgaggaggagtatcgacaatttctggtgatttgtcacctcgcattctcttcaggagttcaggaagcattagactttttttttttttttttgccacttccctagaagttttgaaatcggttacagtaattagaaccaactcctagagatggttacagtgatccagcaaagtcaccttatataaggcaacatttaagtgtggggtggttttagaaatttgggaaactaaagacaatggatttatagggaaatttggatacaatttgattgcccttgtttggttgaaaactgggtccttgagtcatcttataatggctcagctaccctggagcattgggcattcattagttggtctgcaaaatgttttggagttttcttcctagttgaggatataaaagggagaaggatgatcacagtaacagtagctgggagctcaatgctgtaagtactggaggacccaagatccattgtagaacctagacatgcttgagtcggaattgtctctgagttacggcaaaacaagagtaaacgtataagaactacatctagtggatagattcctattttctaagataatatttcaacagttttgtcttgactaaggttgatatatgcacaagcacatttgggggaactctaataaaagaaaagccgctacttccttttaaaaattcattaagaaatacaatagacataatccagaaacagtccgaatgcttcatatttcatctttaaattactcctttgtgggtgttgaatgcttctttgcaatacctttggtaccaccagaagtgatttgtaacaaagcacctgagagaaagcatccatcttgagttagtccaagcttgcaggaggacatacactccaggaataatatcagtttcctagttaggcagcagctgctgtctctcttgcttcctgaatgattgtgttcctggttctttgtagtgtgaatcaaatcgtagaggcataatgagaaaaaaacaacaacatggctgtcatccattttttcttttttttttttttgctaagactcttatttagttgttttaaatagggatttggaagatagaacgcaagacttttctgcatctggatccaccagtgcttagtgtgtaaggtgtattcatttacttctgttaaattgagctctttagtaaggaaaggcaaaattagaaagggaaaaaatataagtgctatcacttagattccattgcttgttaagacagggggttctggtttctgaaaatgcagttaatcattagaaaggaaaaagtatttgatcaacagaatgttatttctaatggctttcaatcaattctttcaaaacacaaagagaaaaagacatcaacaaaataatataaaagcaaacatcaaaacttaggaggttaacaatcaatttaaaagcctcaggaattttgttactgaaacagtcattagaaagcagagaagacaggactgtggtaagttaaagatgatgtttgtgtttgaagaatttgatctggggaaggaagcttgaacacacacaagctctgattcatacaggatgattttaaaggccaggacagtcttatgatctaatgatgtgggacatgaaatcttcattagtcttaggaccagttaaaaaataacaccaccaccctgcactctttaaatagtatttataataagttagtgtatgttgaacattaaatttggtccagataatctaggcagataattgatttaatcatcacatcagcccagcaaggtgttttgttctcattttacagatgaaggggctcaggttagaagacgttacacaacttttccaaggtcccacagaaatcagcgcctcatctatttgactccaaagcccatacctcttgtggcagagacaatgctttgtgtctgctttctttttttctgagcatcaggaagactgcatttcttattatcactaccaacagaatgagttctggacaatgcaatgggagcagaagtcacttgtgtgatttcctggctgaagaaattaagagctaacattccttgtcctggttcttacttctccttctgttgggactgcagattttgctcattttaaagatgtcaatgtttcaagatagaagaactctgggtcacaatttaggaatgtcaccatggagatcctttcaacactcatttttttgcagtgtgggttacaaataaacctttactcttttaagtcactcagattttagggtgtatttattaccacagcatagcctactgtgtcctgacaaacacattttatgccctgcactttaccttatatcctttaaattttagctgttaatacggtatatctcatgttttgttttcatacacaaagagttggtagataataaaataattaaattgtacctgaagaaaacattctctctagcagtgtcatctaaaataagaggaacatttattttaaaattaagaatggcagggggtttttttgcctgaaaataatgtctttgaggctatagacaactttcagtggttcaggggcctgcctgctcatctaatttatgaaggattcatggagtaatatctcctctgtctctgtgtcatccatgatctcttgtcggcttcactctaatcagcatgtctatggaagaaaaaccaaactgtattgaattagttctctttttcttcaaataacttgaaaggaaagtcctgatgtactatattatttgacttatatgattcaacacctttgatgtcagggataggcttaatggaagaagaaatttatgatacattagttccattaaaatgcacctataaatgtcctcttttgagaagtgtctgttcatatccttcacccactttttgatggggttgtttgttttttttcttgtaaatttgttggagttcattgtagattctgggtattagccctttgtcagttgagtagattgcaacaattttctcccattctgtaggttgcctgttcactctgatggtagtttcttttgctgtgcagaagctctttagtttaattagatcccatttgtcaattttggcttttgttgccattgctttggtgttttagacatgaagtccttgcccatgcctgtgtcctgaatggcattgcctaggttttcttctagggtttttatggttttaggtctaatgtttaagtctttaatccatcctgaattaatttttgtataatgtgtaaggaagggatccagtttcagctttctacatatggctagccagttttcccagcaccatttattaaatagggaattgcttccccatttcttgtttttgtcaggtttgtcaaagatcagatggttgtagatatgcggcattatttctgagggctctgttctgttccattggtttatatctctgttttggtatcagtaccatgctattttagttactgtagccttgtagtgtagtttgaagtcaggtagcatgatgcctccagctttgttcttttggcttaggattgacttggcaatgcgggctcttttttggttccatatgaactttagttttttccaattctgtgaagaaagtcattggtagcttgatggggatggcattgaatctctaaattaccttgggcagtatggccattttcatgatattgattcttcctacccaagagcatggaatgttcttccatttgtttgtatccccttttatttccttgagcagtggtttgtagttctccttgaggaggtccttcatgtcccttgtaagttggattttttgcagccaaaagacacatgaaaaaatgctaatcatcactggccatcagagaaatgcaaatcaaaaccacaatgagataccatcttacaccagttagaatggcaatcattgaaaatcaggaaacaacaggtgctggagaggatgtggagaaataggaacacttttacactgttggtgggactgtaaactagttcagccattgtggaagtcagtgtggcgattcctcagggatctagaactagacataccatttgacccagcaatcccattactgggtatatacccaaaggattataaatcatgctgctataaagacacatgcacatgtatgtttattagagcactattcacaatagcaaagacttggaatcaacccaaatgtccaacaatgatagactggattaagaaaatgtggcacatatacaccatgaaatactatgcagccataagaaatgatgagttcatgtcctctgtagggatgtggatgaagctggaaaccatcattctcagcaaactatcgcaaggacaaaaaaccaaacaccacatgttctcactcataggtgggaattgaaaaatgagaacacatagacacaggaaggggaacatcacacactggggcctgttgtggggtggggggaggtgggagggataacatttggagatacacctaatgttaaatgacgagttactgggtgcagcacaccaacatggcacatgtatacatatgtaactaacctgcacattgtgcacatgtaccctaaaacttaaagtataataataataaaaaatttacctataaaatgttggccaactctggtagtctgaatggagcgggtctagcttatttctattcaggagatcaaatctgctttctggggagagctagtactaaaccctgatatttgacaccttgccctttgctacatattctgaagtctgtaacatggagctctccattattttccttattagaaatgacttttgatatccctgtaattggaccattatcctcttgattaaaaatgctgatttagcaaatctcatgaaggaaaacaactttgtcccagggaaatatcataaatgggagatggccgtggtagtggtagtgcacttggatatggccaggtaaaatattgaactcaactgataatatcagggttcttttgggaaatcttaattaaggaagatctttattccacacactttctttttttttcatttctttctttttaagttcagggtacatgtgtagatttgtgacataggtaaacttgtatcatgggtgtttgttgtacagattatttcattgctgaggtgataaacctagtacccattagtatcctgatcctctctcttttcccatcctccaccctccaaaaggtcctagtgtgtgcctctatgtgtccatgtgttctcatcatttagctctccctgataagtgaggacatgtagtattaggttttctgttcctttgttagtttgctaaggataatggcctccagctccgtccatgttcctgcaaaggatatgatctccttcctttttatggctgcatagtattccttggtgtatatgtaccacattttctttatccagtctatcactgatggacatttaggttgataccctgtctttgctattgtgaatagagctgcaatgaacatacacgtgcatgtgtctttataataaaaagatttatattcctttaggtatatacccagtaatgggattgctgagtcaaatggcatttctatcttcaggtttttgaggaatcaccacactgccttccacaatggttgaactaatttacactcctaccaacggtgtataagagttcatttttctctataaccttgctagcatctgttgttgactttcttataatagccattcagactggtatgagatgatatctcattgtggttttgatttgcatttctctaatgatcagtgatgttgagcttttttcatatgatttttggccacatgcatatctccttttgaaaagtgttcatgtcctttgcctgctttttaatgaggttgtttgttttgttcctgtaaatttgtttaagttccttatagatgctgtatattagactttgttgggtsccatagtttgcaaaaatattttcccattttataggttgttttttccattgatagcttatttttctgtacagaagtctttaattagatcccatttgtcaatttttacttttgttgcaattgcttttggcatcctattcgtgaaatctttgcctgtgcctatgtcctgaatagtattgcctagattgtcttccagagtttttatagttttgggttttacatttaagtctttaatccatcttgagttaattttcatatatggtataaggaaggggtccagtatcaatcttctccatatggctagccaattatcccagcagaattttttgagtaggaagtcctttccccattgcttttttttttttttttgtcaggtttgtcaaagatcagatacctgtaggtatgtggtcttatttctggtttctccattctgttccattggcttttatgtctgtttttgtacctgtaccatgctgttttggttactgtagccctgtagtataatttgaaattgggtagcatgatgcctccagctttgttcttttgcttargattatcttggttattctggctttttttggttccttatgaatcttaaaataatcttttccaattctgtgaagaatatcaatgttagtttaataggaatggcattgaatctataaattgctttgagcagtatggccatttcatgatattgattattcctatccaagagcatggaatgttttcccatttgtctctgttccctctgatttctttaagcagtattttgtggttctccctgtagagatcttttacctcctgatatggtttggctgtgtcctcacccaaatctcatttgaattgtagctcccataattcccatggacctggtgggaggtgactgatgtgggcaagtttctcccatgctgttcttgtgatagtgaataagtcttatgatatctgatggttttataaagggcagttcccctgcacatgctgtcttgcctgccaccacgtaagacgtgcctttgctctcctttgccttccaccatgattataagtcctccccagtgatgtggaactgtgagtccattaagtctctttttctttataaattactcagtctcaggtatttcttcatagcagtaagaaaatgtacgaatacacctccctagttagctatattcctaggtatttttttctttttgtggcagttgtgaatggaagtttgttcctgatttggctcttggcttcactattgttggtatgtatgaatgctagtgatttttgcacattgactttgtaccgtgagactttgctgaatcagtttaagaagctttgggccgagaatggggttttctagatataggatcacgctatctgcaaacagtttggcatcctgtctttccatttggatgtcctttatttctctctcttgcctgattgccctggccagaacttccaattctatgttgaataggaatggtgagagagggcatccttgtgccagttttcaaaggggaatgcttccagcttttgcccattcagtatgatgttggttgtgggtttgtcgtatatggctcttattgttttgaggtatgttccttcagtacctagcttattgagagtttttaacataaatggatgttgaattttattgaaagccttttctgcatctattgagaaaatcatgtggtttttgtcttgagttctgtttatgtgatgaatcacatttattgatttgcatatgttgaaccaaccttgcatcctgtggatgaagccaacttgactgtggtggataagctttttgatgcattactgggttcagtttgtgagtattttgttgaagagttttgcatcagtgttcatcaaggayattggcctgaagttttctgtttctgtgtgtctgcaaggtttttgtatcaggatgatgctggcctcatagaatgtgttagggaggagtccctcctcaattctttggaatagtttcagtaggaatggtaccagttcttctttgtacttctggtagaattcagctgtgaatcttttttggtcctgggctttttccacttggcaggctattcattactgcctcaatttcagaacttgttattgttctgttcagggattcaatttcttcctggttcttccttgggagggtgtttgtatccaggaatttatctatttcttccagattttctagtttatgtacatagaagtgttcataatattatctgatggttatttgtatttctgtggggtcagtggtaatatccctcttgtcatttctaattctgtttatttgaatcttctctcttttattcattagtctagcaagtggtctatctatgttattaattttttcaaataacagactcctagattctttgattttttgaatggtttttgtgttgctatctccttcagttcaagtctgattctggttatttcttgtcttctgctagctttggsatttgtttgctctttgttctctagttcttctagtggtgaaacatcataattaaaagaggttgaaaaatttgacatttttctaactttttgatgtgggcatttaatgctataaatttcccccttaacactgcattagctatgtcccagagattctggtatgttgtctctttgttctcattgcttttcaaaaacttcttgatttctgccttaattttattatttacccaaaagtcattcaggagtaggctattcaatttccatgtaattttatggttttgagtgaattccttagtattgatttctaatttgattgctctgtggaccaagaggctgtttgttgtgatctcagttcttttgcatttgccaaggagtgttttacttctgattatatgattgattttacagtaagggccatgtggccatgagaagaatgtatattttgttgttttgggatggagagttctatagatattcataaggttcagttgatgcggccacagcactttcttctaacaattctgtcatttaatcacctcaaatcagaaacacatagttcgaactttgttttgacacactttctattacaggtttttctctaatacagtcatttatatattttaaatacatctatcctcagtacatatgtctctgacaatggtaatctttgattacatcttcctgggggaagttggataaagacatattcaggactgagttaggagaaagagaaactggtgtttctgggtggacgatgaaagtgcttgatcgttttcactattcccctaactgattattgccatcagacacttctagtagatttgatatatgtcatgttttctttcttttagatttatactgataactcaatgttaaaatatcaatgcaaacctagcatcattgtgcaattccctgctcaaacatttatttatttaaaaattcccagtcctgatggtattactgttttagaaacaaaccctggrctaggtgtttagggcatgatgcagctctactgcagaatgaggatttaaagagctttttgttttctttctcattgcatggaggtaaagacttttctggtattgatagaaagtaaaagttgtgccacgctgacagtacagatgagacaaggcacggcattaactgttccatctggtgtttcttaaataggacaaactattcttagagctctgtgaagtgtctgcttcatctcaaaagagttggaaatgactgggcctcttagtgaactcaataggtagaagatgtgacttttaaagctagatgagaaaaaagtggagacataaggcatatggagaagaaatgtctagcaagggattctgtttctatgaaaactcaacaaataggagtttttgttttgttttttaacaataatcacaattctgttcccaatcccaaaccttatttttaataaaaagccatgtttgtgctcttaaataatccttttgagattattattacaatttattatttgcaatgataaactcagcagtccacaggtgtttagctgaaatatcaaagccactgtctctgcatgtggctcataacatttttggcagctattgctgcaataaagcttcctttctatcctctagtctgggcactgaaagagctggtacattgcaatgggctctgtgtaattggatggctgcgaagttatctcagattattctcgtttttctgttttacaacattttttgtcttattaattgcttttttcaagctaaacgttacacagcacaggtttttgatcagaaagtcattggaaattttcttgggactcaccatcttataacataaagtttaaaaagcaatcttcagaagaccaatcctggattgtgattaacctgatgagtcatattggcaatcagatccaagaacagtagagttcaagtgtaatttacttggtttcttatgtctccgtgtatttatggaaagggctcattcactatagtaccaaaactttaaaataactaggaattacatattttcaaaagaatataaacctatactagaagatagagaaaatattgaaaaacacaagtataacaaggttctggtatagaagattcatgtggtaaatatatcttttcctgagtgaatctataaattcaatgtaataattacaataaaaaccccagagggactttaatgtaacttgactctagagttcccctggaacagaaagttcataaaatagttaagaaagtattgagaaaaaaaaataagaaaaataccaattgttctttttacatgattggtgattatttcctggacagctcagtttgctttatgaacaagccataggtctttttaaaattagtccaaaagttagaattttttctagttcaacagatttatgtcacatttcaccagtgcctttctggttgaattaattttgtacaagtcaactccccttaaggttttattagtatgattttataagaacaagactgtagtatgtttgccacaaaataatgctttaaagattttattatttttcattattttacacaaaaatctctaaggctatgaagtaatatcagttttaatagtaaattaaatagtgaaatttaagttaaaattatttttctaattttaagtagtctctgaattaacccatgaccaggataaatattttgtcattacaaaaaataataaatcaatttaaaaatgatcatctgtatatggtcatgcttcactgtaaaacaaattagtctattcctggactcttaactctgtgtcaataacatcttacgagaggattcaagcagagaaacagatgcaaatttattgtctaatttacacttaatgagatgatgggagttgaatctgtggactacttttcttctttcatgacccatgaaaggtattctaaggaaagctggtggtttcagaacatgatgtattttgaaaatattctattgtatgggatctttaattttatcctagactgctccaatgaactatctacaaacaggccaaggtagcatttgaaatggatgttttactaaagattctatgtcaaaataaagttaaattgagctgagacagaatgatgttcttctacattaactgagtttctggtgatcactattttgcatttagtagtcttgggcttctaacagattctttggcctgggccctcactgagcatgttgtcccgggggcactttcttctgcttccacagaagccctctccctgaagaaggcagccctccccagtccaggggtattgcaggcaacaaggagctttcacacagggcagccatgtcttgctcctctaccacctcttcctgaatatggaggagaagttcatcttgggctgatccctgaggaattcttccattttctttatactaaaactggtataacaggaccttatgtgtttggaactggacttacgttgtatgctctttccaaagaaatatatgtaattaccccagagatcttctctaccataccagtagtagagttacttatctttgtaattaaaaaatatggtgcctctgttggagaatttgctgataaactgaatgagcaaaaaaagaaattgcccaactagaagaggtgaagtacgcttccatcaaacaaatccaggataccattgatttggagaagtcacagcaggctgtgggtcacaagtgccattacctttttgatgccaagaggaataacattgctatgactttggagaatactcttcaggaatggctgcatcgagtatataaggaggtaaagaatcacctgtactatcatatctctgtgcaggttatgatgtgttgaaaggaacaagagcacatgataaactgggtggaaaagcatgtggtagcgaagcaaatggtgcagagcacagctagaaaagaaaattgccaagtgcattgctgatcaaaagttgttggtgatcaaaagtgcattgttgatcaaagaaggctcaagcatgagcagtcctgtaaatttatctatcccaattgagacagctaaaaacccttgacctgctaaatggaaactagtctatgtgatgaaatctttctgtattgctgtctactgaagttacggtttaccttgcctaaacatgaaaagtttgagtttcctatactgagagaactaaatctattggccagtcagatgtttctcatcctccttactccacattttgagttgttctatgaccacttttaaataagtagtttgcctttattaaaactgtctggttaaagattatcaagctatagtttaaatttgtaatgaactccaccatattgtaataaagtaacaattgggaaaaaaaggaagcaatcttgggatgtagaaagaatgttccaaccatcttgtgaggctcagttttatgagtaaaatacagctgatgaggctggatatagaattgggatttgggccagatttacagataagaggaactgcaatgactgtatttaataatttattcaaaactatttattgagtgcctctgatgggccatgcatcttgttggatgtaaggatacagtgatgaacaagatcagcagggtcgcatattccaggagcttattattcagttgatggggaaaggcatactctatttcrtgtgaaaattccttgtaatgttgaaatagggtaatatctgtaaagagtataacaagctgtatttgctcaacaaacatttttttttcctttctgctttgcatctttgtgtactggatatctatttgtgatcagttgccaagaagatttagcattcatgcaactttctttttgactgctgattgaatgtaggtcatgaacttatcagtgatgtagagaaaaagatgactacacaagtgtactctgtaactcatgagaaataaaagagagaagcatgtgtccatagtgggaaagcagccatttcaaaggtagacatccagataagtcatgggataattcagagagattagaagaaagtggttcagaatctccccccactcaatcaattgattataagtaatatagatccccttgctaatatcatagtggtatccttggaaactcatagttctgatgggaatgataggagccaaatttcaagttattaggttatttagattcacctccagggtcttccatcctttctgagaaagcatcactttaaggagaaatggaaaatgagagattactgtcagagaatgactgcaggctctttaagccagtgacgatgtctatgcaaggtagggttggctaggctagcagatagatttaaaatatactagattaaaaggcagtaaaatctttcaagctgccatttgaaccacattgttctagacttattccaacaattactgttaaagacttagcaagttctgctacattaactctttgacttggttcacttctgctatgcaatacaccscttatgaactgcttgatagctctggaccaaaggctgtgcctccttgacctgggcttatccttatgttgcacagtgaaagaactgatttgtcttacagtgtcagtgtcttcattccttattcacttaacaacattggctttaccgagtattaaccrcatgtcagatactcttctagacaccaaggatacagcagtgaaagaaacagacaaaaacacctgcctttgtggatatgattttstattgtgtgtggtttgggatagggagaaatacataaacataaaagttaaattttataatatttaaaatgtgtaaaacatagatcaaagtaaggggatcaggagggatgagggagaagaaatcttaaatgggatggtgatattaaggtaagagttcagccagacttaagagagagtgtgtcaggaagatatctagaaagagtattccaagcagaaaaaaacaagtgaagatgcctgaggcaggaatgcgtctggtgtgagagaaaatcatgaagaaagtgactgtggctggaacagagcaagaggggagaaatgaaggaaggaggttagagaaggactgggctcaggttttgtagagtcttgtaagccataataagacctgtcagtttccacttttgccttgccatgtataatgcctctgttacttggcaaccatcaatcttttgcacttgtttcaacacctaacaagggtcagtttatgatacttgattatctaagcatatggaaagaatggcgggaaggcagaaagagaagggttcatggtctccacaaagttgctgattggttagacaaattgctaagattgattgttggcaattgatgagtggtttgtagttggtttttgctatctgaaggcrtgaatgcaccccactggctgtaggcatgaatctttgacatgagataaggaggatgactggagaatttcctaactcaggagctgccagagagactccagcttctgtcaattgaggtattctacatccacaatgctgacaggtatcagtcactttttagccatttgaacatgttcaaagagccatttcttggtacagggttatttttttacttgtttgrccatatgtagttttaattttagcagttaaktttcacatttttcatccattttttggaatgttaccttttggtcttttattttaaaaaatcataacgacattttaatcctttgcttttaaaatgaggaacaggaagcactagcataaagggagagttctaaggatcctattcaaaccctgaaaatatgggacacccctttttctcctccccgaaactctgtagggcttttgatgattggaaaaacatttcgaatcccagcctcagataaggaaaggcaatttcaagaagtcagcccccctgggaagagtcacacttccactacaactaaatgaaacagagaaaatagctgaacacttggaagaatcagcagctcttcatttttctagtaacatatgctacctagatacccatagatgtttttgtatttatatgacgatgccattgttccaggaacaatgttcagaccccatagcttatactaacactaaattcagaaaatgtcaaatgtagtgagatgaatataagttgatcagttctgaccatgagattcaaattctacctagggatgttaggtaattcagaaaatgaggtaatgtcatgtgtctttagtgacttagagtatgctgaggtgacatcaacccacagaaacacaaattagagccaatgaatcaattacagctgagagaggctggggcctctctcaagtygattgaaagttgtggcctttgaaaggacagtgaggccagaagaagaggcatttgcaaagcagagaaacatttaaaaacatttaatctaaaacataaaatgtcttaccagtcattctcttctccatttcagcctccactcatactgccatgctagatattttttcatggcctgatagcaatttggattatattttccatttctgggaagtttgtcttcataataaaataaggtcccacttgtttgaagccaagtgcatggtgagacagaaaggaatgtctcttctaggcaaccaccagggggtagtctggatctgattttagagtaagtgaggagcccaaactgaggtgggtttgagaattcagggttttttttggtgtgtgtgcccattcttggtttcggtctttaaaccttgggaatccagtttcaggactgcgttatactttgggcataaagaaactttccaaaagcaatttgtctaatcatattttgagaggcttcttgacttcttcctcaacaaatggctttttaacatctgcactggtgaatctaggcctggggtcccaactaagctctcaaccctcagaacttcaaacctttcaccttcaaatgaccccgagattaacaagctgatttccttgaggtcacaataacctggaataagtctccaaagcatagatacccttaaaaagccagaggaaacaaattagcattctgagtgggaactgtcctatcagtcactttgcctcttaaggacaattaaaatgtggtcaggctggccggacgcggaggctcaagcctgtaatcccagcactttggraggccaaggcgggcggatcacgaggtcaggagatcgagaccatcctggctaacacggtgaaaccccatctctactaaaaatacaaaaattggccgggcgyggtggcgggcgcctgtagtcccagctactcgggaggctgaggcaggagaatggcgtgaacccgggaggcagaacttgcagtgagccragatcgcgccactgcactccagcctgggcgaccgagccaggctccgtctcaaaaaaaaaaaaaaaaatgtgatcaggctgagaagccaaaatataattccataattttaattagaatatgactttcactgtatctgattcatccagataagtcagttttatttcttatttattttatttttattgaaaaattggaatggtaaaaatttctaatagtactggaggctagaaaataaaaagtaaaatacatttctactccatagtccatctcccttttccagagataaccactaccaatagggtcttgtttattcttctagaaaaaaatgtatacataaacatatatattccattttttaaacgagtgagaacatctcatgtacacacatctgtgttttgctttttcattttatttttactatatgtttttttgggaggttccttgagaaaatgtctttatgattatggttgagtatacatcttggcaaaactgctaagtctgtgtttacgtgtatttgaatttttgttttattgaggtataattgatatgtgaaaaattttcatgtttaatgtatatattttgatgtatctggatatatgcatacacctgtgaccccatcatcacaatcaagatactaaacatattttagtttttgttttcatctccraaaattttcttgtgttttttttgtgttttgtgtgtgtatgtgtggcaagaatacttaacatgagatctcctcttaacatattttaaagtgtacagtagcatgttattaactataggcactatgatgtatagcagatctatagaacctctttatcttgcataataggactttgtactcattgtgcaccaactcccctttcctgtattttaattttttgatggatattaccaggttgcctgccaaggagactgccccaatttctactctgattatcataatttgaaagtattcatttctccgtaccatggccaatacagtactttcaaaacttttgatctgtgacactatattggataaaaggtatatcccactgtttgagttggcatatctttagttataagtcagtttgaatatcttctgacctgcatataagccttttgtaattccttttcttaggtttcatctggattatcatgttgccttctggcacctttgaggacaagaacaacacacagtctttgaggtcatattgtcattggtgttggcaatgacatttagcagctgtgtgtaaacacagtattgtttcattataaaactgtggtgaaagataagggtactttgattgttatagtgggagagaaacattatacatcccatctgacaggcacttgattagtattgtgataccacacagtctatgctctgtaaaatgtttgcatttccctttgaaatggattttactcctttactccttaaataaaaacattcctcataattcttataccataaactgctacaaacagccagatttatttttgtcaacttgtatttgaaaatcttttgcagcattattttagtcttacgaaaaagcaaattggtcatgattaacatttagaaatatctttttagtaagcaaacattttcattcagtatattctctggcaatgcctttttgagctgcttggcttataaacacataatatacactaattgtggaaaccaggaagctggtattctctcttattttggtagaagctgctttgcataggttgtatttattagctatgctggtgacacacatcgtctgtgactaatgtggaaatgctgatagtttacaagcagcagataaaataggccttaggatgtgaataaatttaggatcagtacatatttttaaaatcctgctaaaaaccaagataaaaataaagaagcaaagatggttttcattattatcatgaccagtacttttaaaatggttttcttagtgaggaatagcagcctcagggcaggggaaatataatgggattaaaataaaactagtgccatgatcttaatgtctaaatagattaattttaccgacacaggaagctataatatcatgtctctggtaataactggaacattcttggccatgtttttggaatttacacgagtggcatactctaatctctaggggaagcctaaagattcccaaagattccccactcatttcctaccccaccacctgtggcagacagattttaatatggcttttgaggtctgtgtctcctggtgttcatacctttgtacaatacctcccctaactgtgggtgaaattgttgacttgcttctaatcaatacaatagagcaaagatgatgggatgccacctccacgattatgttatgttatagaaggttctatcatcctggcagtattctatggactamtttcctggttttgaagaagcaagctgccatattgtgggctgcctgtatgggtataatgagaaaaaccaggaattgtattaaaaaacattcctcccaaactaggagggagctgagagaccaaagaatgactcagacaaatccagattggcaagtagaggagtttattaggacttacatgtgaggcactcctggatggcagcaagacaactttagagatccatgctgcttcccattcttaagctgcttttaagctaattttctggctctttgcctactgcatgtgtgtgtgtgtgtgtgtgtgtgtgtgtgtgtgtgtgtgtgtgtgtgtkatgggactgttttccttggtaggttctcagatactctctgggatgtttgggttctcaaggacacctgctcttgggctgggcactgtggccttggcacattgcctggccttcagggttcaggcagtggacatataaccttgcgtaaccaggtgggtgactcaccatgctacagtggggaggcccatatggcaaagcactgaaggtgacctgcagaagatgagggcctcagtcctatagctgcaaggaactgaattctaccaacaaccatgtgagtttggatagaaaccccaggctcagtatcagctctgactgagaccttgattgcagccttgtgagactctgaagcagagaacccagataagctgtgcctaggctcctgacccgaagaaactatgagagaataaatgtgtgttgttttaagctgctaaatttgtggtacaccacaaataaaccactagacaagaaacacagtctgtggcatgttgtagttttgttcataatagtcactgtccttctcttggagcaaatgatacttccattggcatcacataatatgtggtatccatcccaacagaagggtcatacatttttgccttttaaacttgggagtgaccatctgattttctttggcccattgaatctggacagaggcagaaactttgagagccagttkgaggttaggcatatttttcttttcccctcttcaccaggctgtctgatttgtgttgaacgtgtagtagcaaccaaaagtaaactttcccttttgtaagccgttgagattttaggttactacagcataacctagtctttcctcctgagaagaaataattctgtcaatgacacaactgggtcaagttgccatgcagagtttttaaaattttgtggcaggctcctttagatgdctttcctcattgtattatcttcctttggtgattgcttcacagatcattcttctgtgtcttccagaaacaatctggtgcaatcggatagtctggagttgaatgttcttgggactcttatctgaacaaccttcttgagattaggttacagagcaaggggaaggaaaggtgaagtgtactactcaagccttagaaaaaggctgcttctatgggctaatttttgcatcctcttccttacttttttagaagaaagatttcaaagagcaaggttaggatggtgtccaggaaaggaacaaagaggctattttgtctgcttcttgttgggagaaaggattcctaagaccgtaagtggtacagctaagttctcagggcgagaaaccaagtcctaactggtataaacagtgtttcttctctcaaaatgtccaccatgctatgactcctcaagatttagccatgttaagtagctagtaaaggacagagggatttttaggttcctagcatttctctctttggagatccaatgagcactgctgatggtacttaaatattgaaggatagtagaggaaggcaagatgatatgtttccctcaaatgctaccttaattgatcatttaatgaaggacaggacattttcagaatttgcattcttgtcagagtatagaacagagactatttctaaattcctttggaaatattttaatgtgaaataggataattttctacacaatgcttaacgttgactaatattgacttaccgtcacctgaatcagcagacctgggttggaattcttactgtttcatttgtttttatattttttattttcttttccctctagatttattgagtcataattgacaaaaaagttatatatttgtggtacacaaaattataatttgctatatatacattatgaaattattgccactatcaagctaattaacgcatctctccacttagttaccgtgtgtggaggggtgtgtgtgtggtgagaacatttaagatctctcagcaaacttcaagtacacatatgttaataatactgttgtttactctgccatttaattgattgtatgcccttggataaatgtcttcaactctgtgattcagtttcttcatctataaaatatacctatctcccatgatttttaaagaattaactagtacatgtaaagtgcctgattaataaacttaacgtactcttattaattgccacatgtgctttacaacagacaaacttcttaccatattgttgaagaggagacctcatatgcccaaatgtcaattcatatactttcagttggttttttcctgtgcttccagattggctatttcacacatttattagaataactgtagaaatcacagctttctttaagcctcttttcttgttacactcctcctaccagctgttttttctctagcaacaaagttggaactatagtttaaaaaaaaaaaactagttatgccgataaaggagaaaaaaatatttttgcttcagatgcagtcacttgcttcctttgtatcaggaaaggaatcaggcagctatcaactaaacacaaaggttctgatatgcaccatacctatttgtcactggcagccctgcctaggtcaatagcataataaaatttccttctagggcaaaaagattgacctgagaatgggacagaattcgtaattaattggtggaggctgaggaaaactggtagagtgtcaaaatcaggatgtctctaagtgagatgaaagtttcagaggtttttgattcaggtggacaggatttgggctaagggaggctttaggatggccatgattcttgttgatgtttggtaactagagtataaggactgaggcttgattgaaataagatgaagaatctggaagcatgactcattcctgaagacaaagtttctacaggaattaggagttagataggaccacaggtgtccagggtagaaggctaagctgtattaagcctgggggtactgcatgtctgatgggagtagattaggaaagctgtagctcactgaccactgaaaaccacaaacactgagaaactcagaaggaaccaccagcctgactgtccctggtaagagcttggctatggctgaactcccaagaggaagacactatacctggcagcttgggtgaggctgagacagacacatagagttgaaacctgcagtgcattattttctttgtcttttcaaagcagagccattttatatttaaaggggtcaaaagtacaacccctactgttgttagctcccagctgtttgctgacatgtgtggaaatgaaaatttgggaggggctggtccttgacctcattagcatgtgtggttttacttttttgtacctagaaaagaatttatgtaactgcccttatccaaaattaagcttgggaatatgtttgtttaaaaccaactaatcttcatgtttaagtaaagccaatttaattagtaagtatgagtaattacaactattatctaatttataaaatcccattaaatttactttgaagatttaatgaaaattacggttacagtcttaaatcttaagaatatgtttttgtagactatatgatcatagcaaggtcaaattagaatctttttagcaaacaatagaggtaacaaaataaacctaatacgttccttaaatattttcatctcatatttttctacacatgaagatgtttatttggttgatataataatatatcagagaaagattcttttaagctaattgttttttttaataacaaattttatccaaagaaagccacatcttgttaagatttaagcaattttgtttattagggaaatgaggaagattcaacctcagacttgagggattttatctttctttgaacctaaagtaattataagaagaaatgtatatatggatatgtaaacatrtgttatagccaaagtctggaacaggtgatttctgacaatagatagcaaaatttataattaacttaagcagctggctaagcaccgaagtgtcacacagaagaaaaaatagtgtctcattgcaagccaaatatcactgctagtagccaaatgatgcattgtatggctaaacacaggctttctgacttccaaatacatgttggtcattagccaactgaaacaaatgaagttaacattatctaacaaatgttaccttatttgaaattcagactatagcccataatgttttgatgacagactgattttaagtcagtgaggaagttgcttttgaaatacatttctcatttgcatctccatgtatatgattttctgactagttattctgattcatccatttgtctaatatagcagttatttagcttttgattaacaaagtaaggttctgaatagataaaataattatgaaagctagactttatcaagagatgaaattattttttaaaattccatcagcattttagtgtacacttttgtttgtctactcagtaacagtaacttttccttcttttttctaacaaaactctgattcaattcggttaccccactggtagtgcaccttaagggagatatactcctgtatcagcctggggctgaatcatgagtggtctaagccaattatggtcgtctcgttgcctttgccaaaaaccagtttatgtataggcacgtgatgcacatctgagaagtgagaagctgtaaatgcttctgatcaaggctttccttgctataaaaagttactggaatattgttttggcaactaattgagtgcatgaattgagtaaatggttacatcattagatagtgagcattagttttaaaaagcatgtgacataaaattattacagaggaagcactatattaaactaattaacattaaataattattatttagaaatgcaaaaacaactccaccaatatcaaggtactcactagaatggctaacaaaaaaaaagtgacaagtgttgacaagaatgtgggacaacagtaactcttatatgttggtgaatttctaatgaaatatattatacttcattagagaagtttaccaacaatccttcccaaacctgaagaggaaaaagctgttattttcttttgctagatattattgtgtctgcctgtgacacctagaatctggctgtaacctggctaaggatggcaaggcagaaagaagtaagaaaactgtgttttatgacacagctgagcactaaatataaaaacctaaaatggccttatcttgggaataaccatatcagataatgctgtttctgtactatttaagccaaattgagttattttctgttaattatagctgaaactatttcagctgataattgtctattaacattaaaagccaggactgaccatgtagattastttcttccataacacagaaaagatagcccttccatcattaataggaggagacatggtaatcatttgcacaggtagaagaaggttataacatgatggggttcatgttgaaaggagtggggagcataccattctagtgcaggacatttgggaagaaagaggcagagatgagaagtgaaccacttcggattgactgaagtcctagaggagagacaaagacatatggatgggaatataaagcagcacatctcttgtaccaatctatatttgatatcctagcctagtattttattgtaaagagtcctatayctacctgtgggagactgtattagtgttagagggatggtgcatgcatagagggagycttggtgtagctcctgtaagccaccttcgtttttcatacagtggagatagaaatgccaaatcccaggcttctcttgaagtagagagatagaatgttagctgggagttagggtggggagcttgccagaaaacatagtgattgcagggatgaagagactctgtattaaaggacttttggacagactacttaggattcactgccaaccctaaggggatttaaagcaccactgagagcygaggtgggtccaggccagtagacaataccactaggccctgaccaaggtggaggagaacaggtcatgagctagggctcttgggcaggtaccaacaatgccctgccatccttagccagttgatagccagcagggtcactagtacctgggcaaacaaagaaatgtttttcattaagggctagaagagtggcacaaaatcacgtggtacaaataggagactttttcttcccatgccaacaaaggatccagcaaatgaccttacagattcagataataccttggtaagatgaaagagagggtaaggtaatctgaaaaactgaaaaagactgaacatccctaagagatgatctaaaacaaacattattcattttctttgtactttgacacttttgcaggcagtccttggttttaattttggctccattgtttactaactgaatgtctaaggcagattatttaagcttcatgtgcttcggrtatctcctccagggaatgagaataatgacttgtatactagtaacttgtatactaggcatactgtgaacattacaagatatatgtatatatcttgtaatatatatctatatctatatctatgtctatatctatatctatataattccaaacagcaattgggctaaatagactacttagacataaaccatatgactgtacttttctctttggaaaagcagagtagaagtgtattcttaccgatgggggtgtgttgggtgctttagcttgggcagaagactggttaccctgaggtgagttgtgaggcagagatcagaggaatggtcacccctgggatgctctgtccttgttgagcctatgggtgagagtgacatgatatcaaactatttgtctgggtctaccgaaatcaagttaggattcattcagggtctgggagggggacatagttttgagatgaggatatcattccttggcttgcagctgcatcaatctaatccctgcctctgtcattatatggctgtcttcacattgtctttcctctgtgtgtatctgtcttgttttaactttaaagttaaagaccacatttaaccaaatttccaaataaggttacattctgaggtactagggtatatctcttactgggaaacagatgattcaacacaaaacagttcaactccccaaatgtatgtctttcccatgtgcaaaatattaatacattcaccccatcccaacattgctaaaagtcttcatcattccagcatcaatttttaagtcccaaatctcatctaaacactatcaaatcaaagtctcaaatctcattatctaaatcattcaaatcaattatgggtgagacgcaatattatttatcctgaggaaaaactttttttcatcattgaaattgtgaaaccagacaagttctatgtttctaaaatacaatagtgggaccagcatagaatagacattcccatttcaaaatagagaaattgaaagaaaaaagggtcatgggtctcaagcaagtttaaaacttagcagggcaaattttattacatgttaaggcttgagaaatattcccacaggcttgatgctatgacctggtggtggctccacctgtcttgaccccaggtgacagcactgcctatggcctctgaaatccaggaggtgagggtgctatgcmctgggcctgtaccctccgagtccatggtgacagcattagcctgctggcctctgacccaccctggggggtcattcttcccgtyttctgaaatataatacatatttgcatccaaatagttcgattggtttattttcttcctgtggaatcccagaagtctgacagtgttcyttctttttaacccatgcctttacccttcagtccaggatggcagtgtttatgctgagatgactaattggatccacaaatcacatgcctaatctcctgagcaaacagttttccagcaataacattggtgataccgccaaagcacattttctattttttttttttttttgtaatgtggataggctgagaattttccaaatccacaagttttggattctttttgcttaactatttcttcttaaatgtatccctttcctcttgtattttactattggtaacaagaagaaacaagggtgtaccttcagcactttgcttagaaatctcttcagctgaataatgaatacaggttcatcactataagttctattttctacccaacaaaatataattcagccaggttctctgccacttaataacaagaatcacatttcctctagtctccagtaacatgtttttcatttctgtttgagactttacctgaagcatctttaatatttatgtttcttccaacactctctttaaggcaatgcaggctttctctaccaagcacctcaraattcttccagccttcacccatcacccaattccaaagycactttcacattttcaggtatttgttacagcagcaccctgctctcagtaccaaaatatttggtactgagattaccaaatctaggattattagatttgattactctgggtgtttgatcaaacaactgggcctgatagttgacacataaaatgaaccataacaactatataaaaacattccccttctgatattttcacttttaattgaaattgagtctagggaaggaaggatgacctaaatttagctatgtgttcacctaatyctgaggtttttctctccattcctttactaaaatagagtagacagaaacaagggagaaagttatactcttggtctttcattgtatcttctgtccctaaactttgtaggggagattaaaacaaatattctacttctgtctgtttgtatgtgtgtgtttatatgtcgcagagtgggaagagagagacagaatgggggcaggaaggtgcatacacaagagtgtaatttgcaaattcttaaaacatgcaatctatactttcatttcttttcaaaattcaaacttagtgttaagtagggacagattaattgacgggagcctatggatgagtgggagaagaagatagaatgctgagcctggttcttctgtcwtgctatctaatgcaagaaaatgatttgtaataatttaatacatttttggctttttactaaaagagaagcatctctaagcagtgttatttttgtttcaaatcagaatgtagtttgtatacttctgctttcaggtagaaacactaggtagtagcagaacaatgctccctagtaattcaaaaaatatgataagactcatatttttaaatgtaagggagagttgtaggagcaacgagaactagaggaaccagttacagagaggaaagtgccctgccaggtgaattgtatattactgactttttgtctctgcaagcatttgttgattgaggaccagctaaagattgaacatgagataggtgaagaaacttcactggggggagtagaagtcagtagggtcataactaacaggaggctacaccaaaagagtaaaatctccactrgtttcaggatctgaggaggcaatgtcctatgggagagagagggagtgaatcaaacatacagctggtctcccaagtgatttgtgtaaagctaaagagtaagccaatatatctgaatggaagaactgaatgttgtgaaatatttcaaggaagaggaaatagatctgataaactctgaatcagaaacccatgagagtaacacctgaggagcacagataaataaaagatggagtgaggctaattaaaagtgctacccagccccaacacagctaaattgtttactggattctagtgattagacccttagcctgctctggggggataygctgtgaggtttccaatgtacgtatatacacattgtctrgcatacaatgaaaatgtaagggagattgaaagagacaataaaggcagatccacagtgatccatctgttacagttactagaagcactataaagtaataatgattaacgttaaagagaataaaaaggtagaaaaatgaatagttaatgtacattctggaactgagaaatagaaaatccgaaattaagaatgcattggattggcttaccagtagactggacacaaaaaattagtggactcaaagatggttaattgaaataccataaatatataaaatatatatctaatatcttctctctgtctaattatctatttagatccttaaaaggagagaaggaaaaaaagcaatgattgaaggtaaatggctgagaatgttccaaaaaatgataaaagatctcaacctgcagattcaagaaaaaattcgtagaagttgcctgagtttaaaaaaaaaaaaaaaaagatgcattatctttaagacagtaagactgaatgaggctgaattttcaacagtaactatggaagccagaaaatgataaaataatattttttaaatgataaaaaaaactactggcctagacttmtataacctatgaaaatatactttaggcatgaaggtaaaagaaatatttttttagacaacaaaagttgaaagaatttataagaattgcacaggaagtttctcagaagagcaatttttatcagattgaggcaccggggtacaagaaggaataaggagcatttggaaggcaattatgtaggtaagtacaaatagcattgattaatacaataaaattaccttgtaacatatgcaaaacatgggagtaaaatacatgacattactagcaaaaagagcaagaagtagacaaacrgtattgtagtcttgcattttgcaggaagtgttagattattaatgtagccctgcttgggatagatccatatgcctattgtacttctgacaataactactaaagttaattttaaaatgtatatctaaaaatctaattagaggatataaaatagaaaaacaatgcttgattcccacagaaggaagaaaagggcatatacaggaatgatgtattgctaggataagtaaaaacaaatagtaagataatacagttaaaagtaactgcatgaaaactacaccaaaggtagatggattaataccttagttaatgagaaatattatcagattatattttttaaaagatccaactgtatgctgtttgcaaatacacacttttatttctattataaaattttcatttttaattgtaaattgacaaattataattgtatatgtcaaagggatgttataatttatgcatataatgtggaataatttaaccaagctacttaacatatctataacttcaaatacttatctttttgtggtgagaacatttraaattcactctcagtgattttaaagtgtgtactacattattatttactatattgattacactgtataatttatagcaaaagaaaaaacccattattcctctaattgaggcattataccctttaaccatcatctctccattccccatcatacccctaggctttggtaaccaccattctactcgctgcttctgtgagtttattttagaaccctcatataagtaagaacataaagtatttgtttttccgtgactgacttatttcacttaggatgtttcccaattccatccatattgtcacaaatgacaagatttccttctttttaaagactgaatggtatttaattgggaatatgtacattttctttatccactcatctgttgatggactctgtttggttccataacttggctattgtgaatagtgttggcaataaatagaagagtacagatatctctttgacatactgacttcaaatcttttgggtaagtagccagaagtggaatagctggatcatatgataatattgtttttagttttttgaggaacctccttaccttttttcataatggtggtactaagttacagtcccaccaacagtgtacaatggttcccttttcttcatatcttagcgaacacgttttctcttttgtctttttgaaaatagctattctgccaggtgtgaggtgatatctcattgtggttttagtttgcatttccctaatgataagtgatgttgaatattttgtcatatgtctattggccatttcttaattatctttgagaactatctgttcaggtccattgcccattctaaaatcagatattgttttctttctataaagttgcttgaattcctaatatatattgtggatattagccctttattggatgtatggcttgaaaacattttatcctaatctatgggttgtctcttcattgtgatgtttcatttcttgtacagaagctttttagtttgatgcaatcccatttttctcttcttctttttttttttttttttttttgagatggagtcttgctctgttrcccaggctggagtgcagtggcatgatcttggctcaccacagtctctgctgcctgggttcaagcaattctcctgcctcagtctcccgagtagctggaccagaggcgtgcacaaccacamctatctagttttttggtatttttttttttagtagagatggggtttcaccatgttggccaggctggtcttgatctcctgacctcaggtgatccatgcacctyggcctcccaaagtgctgggattacaggcgtcagccaccgcacccagccacaatcccatttttctgtttttgcttttgttgcctgtgcttttgagatcaaatcgaaaatatcattgcccagaccaatgtcacatagtttttctcatatgttttcttctagtagttttaaactttcagtacttatggttaaatctttcatccacattgacttgatttawgtatatgatgtgagataaaggtccaatttcattcttttgcatatccatattgtttactcaacactatttatttaagggactccttttcacaacataaaaggcacatttgttaaaaattcttggcacctttattgaaaatcaattgatcagagatgagtgggttcatttctgcattctctatccttttccatttgttaatgagcctatttttattccagtaccatgctatttaaattactttcacttcatatataatttgaaatcaaatagtgtgatgtttccagctttcttctttttgcttatgattgccttagtttttcaagatttttgtgctytcatatgaattttaggwttgtattttttctatttataggaaaaatgacgttgaaattttgatggaaattgcattgaatttgttgatcactgtgcctaggatggatattttaacaatattaatttttccataccatgaacaygaggtatctttccatttgtttattttcttcaattttttcattaacattttatagttttcagtgtacaagtctttcacttccttccacagaaagtttttaatagttattgtaaatgagactgttctcttgatttgtttttcaagaattttattgttagtgtatagaaatactactaatttttttgtgttgattttatatcccataaggttactgtatcatttattctaacagtttttttggtggcttctttagagttttctagatataagattatgtcatcagcaaacagcaacaatttcatttcttccttttttatttggatgccttttatttctttctattgcgtaattgctttggcaaaaacttctaatgctatgctgaatagaaatgctgagagtggacatccttgtctttttctggatcttagggaaaagggttcaatttttcactgttatttatgattttatttgtggacttattmtatatggtccttattgtgtttaggtacattccttctatacctaatttgttgaaagtttttatcattaaagaattctgaatttttctaataatttttctccatctaatgagaygatcatatagtttttgtttttcattctgttaatgtagcacgtcccatttattaatttgcaaatattgaatcatccttgtatcacatgaataaatcccacttgataatgatgaatgatcctttaatgtattgataaaatcagtttgctagtatttttttgagtacatttgcatatatgttcaccaaggatagtgccctgcagttttgttttcttctgatgtccttatttcactctattatcagagtagtgctggccttatagaatgttttaggaagaattccctctttaatttttttggaagagtttgttaagtattggcattgttctttaaatgtttgggcgaattcagcagtgaagccctcaggttctgggctttgctttcagcaagactttttcttactgatgaaatctccttactcttaattggttggttcaacctttctgtgtcttcatgatttcttcaaaatctaccaagattttagtcttggtagtttgtgtttatctaataattcattcatttcttctaggttatccaatattttggcatctagttgctcataatagtcgcttatgatcctaggtatttctgtagtatcagttgtaatgtctcctttttaattgccgattttttcttagtcgagctaaagrtttattaattttgtttatcttttcaaaataatwtagttgcattgatcttttwtattattttcctagtctctattttatttattttctggtttttattgtttctttttttttttttttttttgctgtcatcaggcttatcctttttctattttcctgaggtgtaatattaagttgctcatttgtgatactttttcctcttttgatgtaggcatttattgctgtaaattttcctcttagaacttattttgctgcatcccataactttgggtatattttcattttcatttgtctcaagatatttttaaatttctcttttaatttcttcattgacgcatgggtgttcaggagtacgttttaaaatctccatgtgtttgtgaattttttgacgttttacttattattaatttctagtttcataccattactgtcaaaaaaaaaaggtacttgatataatttaaatcttcttaaatttgttaaggctcggcttgtggcctaacataagatctatcctggagaatgctccctgtgcacttgagaagaatgtgcattcatttgctgttggacagagtaatctgtgtatatctgttagatccctttggtctaaagtgtttatgctcaatatttaataattaattttctgtttggatgccctgtccattattgaaattgggacatttatatttatataaatataatttatatatttatataattatattatatattaaatttatataattctatttatgtaaatatatttatataattatattacataaatataattatattgataaatagaaatataartttatatacatatttatatgtatataatacaaatataaatttatatttatattatataaatatacttacataattatatttatataatataacataatttatataattatataagtatattatataagtatatttatataaacatatttatatagtcataattataaatgattatataaagcaatcaaaacaataatatacaaatggtaatttagtatattaatatccttaagcattattatttattcagcttgaaaataaattctcatccatttttcttaataataagcagttttcttttcttttcttttttttttctttttgaggcggggtctcgctctgtcgcccaggctggagtgcagtggcatgatttcagctcactgcaagctctgmctcccgagttcacaccattctcctgcctcagcctcccaagtagctgggactacaggtgtccaccatcatacccggctaatttttttgtatttttagtggagacggggtttcaycgtgttagccaggatggtctctgtctcctgaccttgtgatccgcctgcctcagcctcccaaagtgctgggattacaggcgtgagccacagtgcccggctgcagtttcattttcttaacggtgtttctttctaagggtattcactttagaaataatataaattttcacagatatgaaccaaaagatatttttaagtttttttattctttaacttttaagttcaggggtacatttgtaggatgtgcaggttggttacataggtaaatgtgttccatggtggtttgctgcacagattatcccaacacctaggtatcaagcccagcatccattagctattcttcctgatgctccctctcagctccccacaacccctgactgacaggtcccagagtgtgttgcttcgcaccatctgtccatggtcccactatctcatcattcaggtcccacttattagtgagaacatgaggtgtttggttttttgttcctgcattagtttgctgaggatcatggcttccaattccatccatatccctgcaaagaacatgatcttgttcatgtttatggctgcatattatttcatgatgtatatgtaccatgtttactttacccagtctatcactgatgagcatttacattgattccatgtctttgctattgtgaatagtgctgcaatgaacatatgagtgcatgtatataatagaaaaggatacatatatatttatgatttatattccttggggcatatacccagtaatgggattgctgggttgaatggtatatctgcctctgggtctttgagaaattgccacactgtcttccacaatggttgaattaatttatactctcaccagcagtgtaaaagtgttcctttttcttcataacctcaccagcatctgttgttctttgacttcttaataatagccattctgactggcatgagatggtatctcattgtggttttgatttgcatttctctartgatccataatgttaaacttttttgtcatatgtttgttaaccacgtgtacgtcttcttttgagaagtgtctgttaatgctctttgcctcctttttaatgggttttttttctcataaatttgtttaagttctttgttgactctaggtattagacctttgtcagatggatagattgcaaaatttttctcccattctgtgggttgtctgttcattctgatagtttcttttgctgtgaagaagctctttagtttaattagatctcatttgtcaatttttgcttttgttgcaattgcttttgggattttcataatgaaatctttgcctgtgcctatgtcctgattagtattgcctagattttcttctaggctttttatagttttgggttttacatttaagtctttaatccatcttggttaatttttgcacatggtgtaagaaagtggtccagtttcagttttctgcatatggctagccagctcttgcagcaccatttattaaggaggcagtctctcccccattgcttgtttttgtcaggtttgtcaaagaaaagatggttctgggcatgtggtcttatttctgagtcctctcttttgttccattggtctatgtgtctgttcttgtaccagtaccatgctgttttggttactgtaggcttgtagtatatagtttgaattcaggtggcttgatgcctccagctttgttctttttgctttggattatctcagctatgcgggctctttttttgtttcatatgaattttaaaatagtttttatctaattctgtgaagaatgtcagtggtagtttaatgggaattgaattgaatttataaattactttggacagtattgccgttttcatgatattgattcttcctgtccatgagcgtagaatactttttcatttgtttgtgtacttctgatttctttgagcaatgttgtgtagttttctgtgaagaagttatttacttccattgttagctgtattcctaggtattttattcttttggtggcagttgtgaataggagttcattcatgatttggttctcggcttgcctgttgttggtgtataggaaagctagcaatttttgcacatcaattttgtatccagagacattgctaaatttgcttatcaacttaagaagcttttgggtgggacaatgggattttgtagatataggattatgtcatctgcaaacaaagataatttgacttcctcttttcctatttgaatacgcttcatttctttctcttgcctgattgtcctggccagaacatccaatattatgttgaatgggagtggtgagagagggcatccttgtgctagttttcaaggggaatgctttcagcttttgcccattcagtacgatgttggttgtgggtttgtcatatatggttcttattattttgaggtatattccttcagtatctagtttattgagagtttttttaacatgaagggatgttgaattttatcaaaggcctttaccgcatctattgagataatcatgtggttttgtcttgagttctatgtgatgaatcatatttattgatttgcatatgttgagccaaccttgcatcctggggatgaagccaacttgattttagtggataaactctttgatgtgctgctggatttggtttgccaatattttattgaggatttttgcattgatgttcatcaaagatattggtctgaagttttcttttttgttgcgtatctgccaggttttggtatcagaatgatgctagcctcatcaaatgagttaaggaagagttactccttttaattgtttgcaatagtttcattagaaattgtaccagatcttctttgtatctctagtagaattcagctgtgaatctgtttggccctgggcttttttcgattggtaggctgtttattactgcctcaatttcagaactcgttattggtctgttcagggatttaagttctttctggttcagtcttaggagggtacatgtgtccagggatttatctatttcttctagattttctagctcatttgcataggagtgtttatagtattctctgatggttgtatttctgtgggatcactggtgatatctcccttatcatttcttattgtgtttgtttaaacattctctcttttattctttattagtctacctagtggtccatcttattatttctttctcaaaaaaccagctcctgagtttgtggattcttttttaagggttttcatgtctctrtctccttcagttcagctctgattttagttatgtcttgtcctctactagctttggggcttgtttcctcttggctctgttgttcttttagttgtgatgttagtttgctaacttgagttctttctagctttttgatgtgggcatttagtcctataaatttccctgtttacactgctttagctgcatcccaaatattctggtacacggtctctttgttctcattagtttacaagaacttcttgatttctgctttaatttcattatttacccaggaatcattcagaagcaggttgttcaatttccatatagttgtgcggttttgagtaaatttcttaattttgagtttacaatgtgattgtgctgtggtctgagaggctgtttgttattatttcagttattttgcatttgctgaggagtgttttgcttccaattatgtgatcgattttagagtaagtgctgtggggcaatgagaagaatgtatattctgttgttttgggttggagagttctgtagatatctatcaggtccacttgatccagagctgtgatcaggtcctgaatatctttgttaattttctgtctcggtgatctgtctagtattgccagtggggtgttaaagtctcctactattattgtgtgggagtctgagtctctttgtaggtctctaagaatttcctttatgaatcttggtgctcctgtatgggtgcatgtatatttaggagagttagctcttcttgttgaactgaaacctttaccattatgtcatgcccttctttgtcttttgtttatctttgttgtttaaagtctgttttgtcagaaactaagattgcaacccctgcttttttttcccatttgcttagtaatttttcctccacctctttatttcaagcttatttgtgtctttacccatgaaataggtctcttgatgacagcatagcaatgggtcttagctctttagccagcttgacattctctgtcttttaattggggcatttagctcatgcttatttaagcttagtatggttatgtgtgaatttgatcctgccatcatgatgctagctgtttgttttgcagacttgcttatgtgattgcttcagtgtcactggtctgtgtacttcagtgagtatttttttttttttgagatggaattttgctcttgttgcccaggctggagtgcagtggcatgatctcggctcactgcaaaccacctcctgagttcaagtgattctcctgcctcagcctccggagtgactgggagtacaggtgtctgcaaccacacccagctaatttttgtatttgtggtagagacaaggttttgccatgttggccaggctgatcttgaactcctacctcaggtgatctgcccgcctcagcctcccaaagtgctgggattacaggcataagccactgtgcccagcctttggtgagtttttgtagtggcaggtaacatttttttctttccatatttagtagttttttcaggagctcttgcaaggcaagcctggtggtgctgaattccctaagtatttgcttgataatttagataaagtggagaaatatacatttccaagattgccataagaattagtagaaaatatgaatgatgctacatctgttaaataaattgaatccaaatttaagcaactttcttgaaaagaaaaactgctgacctagatagcttcactgctgaattcttttacataattttmaatattaaaaaaataataattgacataatagccatcatagacaaacccttttaaaatagagaaaagagaacacaggcagtctagccatgccacttttttctgagtttcttgtgaaatgagactggagtgggcttcttgggagaagtctcagagtgctagaaaagctgggtgttcacctctgattctctttttcctctgcagaaaatgtrgttcatggagaatcttttcagtgtggcactgtgctgacttgggggaaggggaaaggtaacacagtcagagtgagacatttctattaccttttccatacagtttttattttgttctatgaatcatgcaggtgtctcaggcttatttccagttctgggggttttcaccaaggtgttcttttctttgaatagctgctacattttctctctgtgtgttgtgggagagtatagtgaaacatgagacctcctattctataatcttgttgatgtctcscacatatatactttaaatataaggatacaaataagtgggaagtaaatatatgggaaaacatagactatgcaatcactaactgaaaaaatctactcttctattcctttatcggacagaatagcttggtaccaaaacttgacatggatattaaaagaaaattaygattctgtatacttggagctgggatacaaaattctaaacaaaatattaacatacaaaacttaacaacatataaaataggataagtcatcattaccaagtaggatttattccaggaatataagggtttaacattgaaaattaattaatgtaatttaccacattaatactatcaatagatgtggaagaagcatttgttaaatataagcatgtattcatgatttttaaaatatcaccaaaatggtaataaaataaaacttttttaatctaataaagagtatatataaaaatatacagtaaaatcatatttactggtgaaatagtaaatattgtttccttatcatattaattttatggttttcctgttctgaactataacatgttattaataatttcctcaaactgaactgaagctgcaaatgtaatatataatatttttatttcaaattatgaagacatttaattttacctcctattgggtgaatctaaatcatctcttttaatatagaaatgatggagttatcaggtagtctattcaccgcaataagtacagtactttatactttaaaacatttaaaattggaaataaactaaataataatggcatgaaaccaattaaaagggcaagtcaggtgtaattgtagcgtgagttaaaattcagtgttagtgtaatacagaataggaaaaggaaagagaatgttcaaaatgtagcattctctccatggaagaaacgtgaatctgagttcagtaacaactacccaatcagacacgtccagctttgtctaactccaggaactttttttctggtatgactgagaaaatagtctgtgttttggaggcagaggtacatatatacttaaagtgaacttttaaaataataattttaaaatgaatttccttggatagcagagagaggccagaatgatatagagattagaatatgggaggaatgtcttttccagtgcaatatttgtttttttctagcataattataatttgttgttagtctcttttctatttcttatatgcaagaaaaattttcttggtacatagtatttgcatgtatttgtggagaacatgtgatactttgttacatgcatagaatgtttaatgatcaagtcagggtatttaggttatactatcactacaagcatttatcatttctatgtgttgagaatatttcaagtcctgatttctaggtattttgaaatgtactcttcattgctgttaattatagtcaccatactctaccatcaaacattagaacttattacttctatctaactatatgtgtataacrcaaagtgagccgtctctcttatcctttccagacagtttttattctgttctgaggattatgctggtaggccaggctcattctcactttcttggattttcacccacctttcttattccccgtcccattccccaaaacccacacctttcccagcatctggtaactatcattctactctctatatccatgagatcagcatttttttagctgtaacatatgagtacatgcaatatttgtctttctgtgtctggcttatttcacttaacatgatgactttcagtttcatccatgttgctgcaaatgacatatttttttgcagtatattcatgtaacaatgattttgctttttaatggtcaggtaatattctactatgtaartaaaccacattttctttctccattcatcaactgatggacacttagattgattccgtattttggcaattgtgaatagtgttataataaacataagagtgcatgtatccttttgacayagtgatttcctttcctttggataaatacctgccagtgaaactgctggattgtatggtggttctatttttagttttttgagaaatctccatacagtgattcataatggctgtactaatttacatttccaccaacactgaatargrgttctgatacttacacatctttgctagcatctgttacttttgatctttttgataatagcttttgtaactgggatgagataatatctcactgtggttttgatttttgcatttcccttataattaatgatgatgaacatttgattcatatatctgttgtccatttgtattccttcttttgagaaatgtctgtttagattatttgtccaatttttaatggaacgtttttatgctgttgtctgatttcttttataatctgaatattagtctctttttgaatgaatatttgacaaatattttttccattcagcaggttgtctcttcactttgttgattatttcttttgctgttgcagaagttgtttagtttaataacgtcccattcgtttattctgtatttctgttgcttgtgcttttgggatcttagccataaaatgtttgtctagaccaatgtcctatagtgtttcccgtgtgttttcttctaatagttttatagctttggatattacatttaaatttttaagtaattttctatatggtgggaagtaggggcctagtttcattcttctgcatatggatatccagttttcccagcacaacttattgaagagagtgtctttccctaaagtatgctcttggcacctttgtcaaaaatcaattggctttcaatacaggagtttatttctgtgttctctatccagtttgatttgtctatgtgtctgtttgtataccaataccatgttgttttggttaataaagacttttaatatgttttaaagtcaggtagtatgatgcctctagttttgttcttttttctcagtattgctttggctattcaggttcttttttggtttcatacaaattttaggattttcttatttctgtgaaaaatgtgattgctattttgatagagactgcattgaatctataggttgatttgagttatatggttaatttaaaaatattaattctctcaatctatgagcctgggatatctttccatttatttatggtctcttcgatttctttcattagtgttttataggttttgtagaggtctttcacatctttggttaaatttattcctaggtattttattttttggtagctattgtcagtgagattgctttgttaatttcttttgcagctagttcattattggtatatataaatgctactgatttttgtatgttgattttgtatctgaaactttrctgaacttgtttatcagatctaagaggtttttttaaggtcttttggtttttctaattataagattatgtcatccacaaagaaggacaattttatttcttcctttctaatttggatgctctttatttcattctcttgccagattactckggctaagacttccagtactgtattgactaggaatagtgaaaatgggcatccttgtctagttccagttcttacaggaaaggcttctagctttttcccattcagtatgatgttagctgtatgtttgtcttatatggcctttattatgctaaactatcttccttctattccttgtttgttgagtgtatttatcatgaagtgatgttgaattttatcagatgctttttcttcacctattaagatgatggtttttgtcctctattatgygctgcatggtgttttattaatttgcatatgtaggttgagctatcataatattcctgggataaattctacttaatcatgtygtattatgtctttgatgtactgttggattcagtttacttgtattttgtcaagggcttttacatctatgtcatctggtatattggaatatagttttcttttttagtcatgtccttgtctggttttggtagtaggttaatgctggtttcatagaatgagttacaaagtagcctccccttttccaatttttggactagtttgaggagcaytggtacttgttcttataacttcggtagaagttggctgtgaagctgtcaggtcctgggcttgaaagacttttttttttttttgaaaccgattcaatgttgttacttgttattggttgttccggttttctgtttctttcttattcaaccttggtaggttgtatgtattcagaaatttatctatttcttctagattttccagtttgttagtgtatagttgtttacagaagtctctgatgttttggtatctgtggtatgaattgttatgtctcctttttgtttctaattttatttgggttttctctttttttacttggttaattttatgggtggtttattgattttgtttatcttttcaaaaaccaacttttcattttgttgatcttttgtattttttgtctctatttaattgagttctgctctgatctttattatttctttaataattttaggtttggtttgctcttcttttttaattccttgaggtacatctttaggttgtttatttgacatctttctacttttttgatgtgggcatttgttgttataaacttctatcttagcattgtttttgctatatctcataggttttattatattttcctttttatttgtttcaagaagtcatttgattctccttttaacttttttattaacccagtggttgttcgggagtatgttgcttaattttcatgtatttatacagttttcaaagtttctcttgttactgatttccagttttattcttttgtggtctgagagatactcgatttcaatttttaaaaatttattgagacatgttttgtggcctaacatgtggtctatcgtaatgttccagctcttttatgagttgttctgtaaatgtttgttagggccatttggtctaaagtgcagtttaaatccaatgtttctttgttgattttctgtctagatgatctgtctgttgctgagagtggtgtgttgaagtccccaaatattatatattgaagtctatttctccctttagatttataatatttgctttatatatctaggtgctccagtgatgagtgcatttatattagaactgttatatcctttggttgaattgctccctttgtcattatgttatgaccttctttgtctctttttactgtttttgtcttaaagtttgttttatttaatgtaagtatagctacttctgcttgctattggcttctgtttgcatagaatattttttccatcttctgtgtatagtctatatgtctttacaggtaaagtgagtttcttgttggcaacatattgttggatcatgttgtcatccattctagcagtccatgtcttttaagcagaatacttaatccatttacattcaaagttattattgatatgtgaggacttactcctgccattttgtttattgctttctgatcatttatattgtcttcattctttattattgcttatctttatggtttgatggctttctgtagtgataacatttgaatcatgctgctataaagacacatgcacacgtatrtttattgcggcattattcacaatagcaaagacttggaaccaacccaaatgtccaacaaygatagactggattaagaaaatgtggcatatatacaccatggaatactatgcagccataaaaaatgatgagttcatgtcctttgtagrgacatggatgaaattggaaatcattctcagtaaactatcgcaagaacaaaaaaccaaacaccgcatattctcactcataggtgggaattgaacaatgagatcacatggacacaggaaggggaatatcacactctggggactgtggtggggtcgggggaggggggagggatagcattgggagatatacctaatgctagatgacgagttagtgggtgcagtgcaccagcacggcacatgtatacatatgtaactaacctgcacaatgtgcacatgtaccctaaaacttaaagtataataaaaacaaacaaacaaaaaaataggtttataataaataaatatttttcattttaataaaaaaaamaacttttgaatcctgtctcttcctcatttgcgtgttttacatttgcatgtgcttttatgattgtagatactgtcttttgcttccatgtgtaacactccctaaagcatttctcatagggctggtttagtggtgatgaaatctctcagtttttgcttgtcttggaaagtctttatttcaccttcatttgtggaagacactgttgagttacagtattgctgcctgattttttgtttcctttcagctctttgaatatattatgccattttttttctggcctataagatttctgctgagaagtctgctgctagtctggcgggttcccttatatgtgactagacacatttcttttgttatagaattccctctttgtctttaacttttgatagtttgactataatatgcaagggagaagatattttgtacttttatatatttaaggatctctgagtttcctttatctgtatgtctaaatcctttgctagacttaggaagtttccaggtattattttgttaaatcagttttttatgtcataaaatttatcttcatcttctggaacatttaaaatttgaattttagatcactttttgctgtcccataaatcatgaaggctttctttttattttttatkcttttttgtctttttgtctgaatgttttattttgaaagacctgtcttcatgttctgaaaaactttctgctgctttatctagtctattgttgaagctttgaattgtaatttgtattttatttaatacattcttcagttccaggatttctgtttggttcttttttatgatatctttctcttttatatcctgaattgttctgatttttttgtattgttacctgttttctcttgyatctgactgcacttctttaatattattactttgaattatttttcaggcatttgataaattttgtcttcattggagtctgttgttgaagaattattgtgttcatttgaaggtgtcacatttccttgctttttcctgtttcttgtgtctttcattgatattagcaccttggatgtaacactcacttctaattttgtgaattggtttttgtagagaaagacttttttcctgtagatrtatttaaatgttggtcgtgtaggggagctttgctttgattccagttgcacacagtagtatactctctgtatgattactttggctgtaaacagtgtcagtgatgtctgtgatttcctcagtggctttagctgcacttgttagtggaggctatggtgagcttttgctgggaatagactgccgaggctagttcttatgcctcagtgatggcaacagcagtctgagtgtctttatatttggagccccrggtggtatatgttggcattggtgttaggtggtttagatgggcagtttcttgggcctttaggcagatttcttggctgtcagtagtggcagtggggggatgagtgggtgtgtgagtcctttcgtcccttggatgtgtgagttcttgggtctctgagcagcatgcatggtgtgagtgatggtagttgtggtgatagtgttacgggatstttgggtgtcamttctctggctaaaaacctctgtgtcccrtggtgcctttgcctgactcttgtttgggcctgctgggcttgttctgcccactcaacctggcaggctgtgctcagctcaccctaccagcctggaactcatgcctccaagggaaactgtgagtcaaacattgagcagccaggggtgtgtgagtgagcctagggtccagccactgtgcagtcagacatgctggctgctgctgcagggcaggcagctccaggtgcctgcatgggtgccagctttctgggaggctgtggctgtaccaggcatactgcaagcagcttctccagctggcaccagtgaatgaggtggcacccagaagcctggagacaccgggaactgcagggccccaaagagggagtcatagccctggctcagggagctcccaggtctgggcaccccaaagggccacagctcttctctccttcttgtcacctgcaatgtggcgagcaagggacatgtctcagccctgtgtgtgtgttacagctcttttrgcttcaccattcagcgggtcccgagtaattgttctgcaaccaggaagaatgagctatgcagatatgtgaagggtgagcaagacraagaggagctttattgagtgatagaacagctcagaggagacccgcaggggcagctcctttctagaactagggtgtcccatgagtgttcagctactagcagagagggtagctcctctctgcatctgatcatcccaatgagggttcagctcttagcagagagagtagctcctctctgcagctggctatcctgtcatctgtttagctctggctgagcccaaggcttttatagacctaagaagggagaaagtgcacactgaytggtccttgggccaccaggagcgggtcaggaaaaggtaccacaagttcccactccggttcccatcccaggtttcttgggactagcagcgcaaacctgaaggtggggccttactggggacccacctgtttccgcccaggagcctatctgcctcatgccaccatccatgatgtccaggctgctcatgccaaggggcacctgcaggccagtgccaagctgccctcagccctccytcagattccccctgtatgcttgtcagtgcccaaagtctagagggggccaaggtggcagggggctgttatgttagcactgccctgaatgtgcacacacctggctgggcagtgacagtgaccaggcttggccccawtcctacttcaggattggagcaggctctgtgagcagggagaggccaggccatgagagtcgacactcccaagcctgtgggggcaaagggcccttcctgggcccccgagagtgcagagtgcagagatgcctgagtcctgcacctgggaggctggagctcctgcctgctccatggagcatgcaggcagccccggccatgcctgctcacagcatggggcaggggctccaggttctcactgggcacctttctgcctgcccctctgcccaaccgcactgctcccccactggtgggtggctcgtcctgaccccactgtggcagcccccagggtggtgggctccaggggctcccacttgtccctagctcctgccggctccatggagcatggcaccaccctgggcccagctccgactcctccatatatgttccatgcacttgtccctgctcctgctgccactgctcgtacctccccactgcagctggtgcagtggcagtggccactacagacagcctgctgctgccatcagtgggacaattctcaggctttcagttggctcttgctgttgttaacagtgggcacaatgggctgaatgggcctgtccccaagccccaaagtgatgtgtacaggtgagtgtaggtggtggtggtggtggcaggcaggacaactccgtgctcaggtccccagaaggaatgtccagatgccagaggtggttgatgaggtggagtgattatgaagatgctgaatggcatgcttgtgtgctgacagcaggttttctaaacctgttgttaggctctctgttgatatgcatgcatgcctggggttaatgatagggtggggtgatcccctgcttccaggtgtcgtgcttgggcactagcacgggtggtgctaaatggagaaggcctggtatcaggttcttccaaaggtgtgcatggacataggctgtgatggttgtggtgaggcaagctccaggcatccagaagatatgctatatcaatggccaaccagtaggtgctctggggctgttattagctccttaggtgtgtgtgcctctggcaactgatgaagcaggacaattcctgaatatgtttgtgcactgggactgggggccartgccaggccaggcaggcctgttctcaggcgcccagtgctgtgcatgagtgcagactgtcataagcacagtggaccaacacccatgccccaggcagtgtgtttgagtggttgtgtggcagtgaaggcaacgcgtggggaaaccctgttttcagcacgtgtgccaaaacacagaggccctcctgcttgggaggacagagtttctatctgtggtagccaccccacgaaggtgggttacaagctctaggtaccacgtgcttcggtcccaggcagcagcagtggtgagggcacttgcaagtgtgcggcagccttgctgctagggtggggaaattctgggaggttgctgtcagggatagcagccccaggcaggggggtttcaggctcttcggagcatgcacttgggctccctttgtcctgggggcagcatccctggtacactgtacctcccttggccctgcttgtaaggttctgtgtgggctgaagtgttgaggaccattgctgctctgctggatttaactgatgtctcgctgctgcagtccccaggatatgagggctcttagtgagcctccagaaatgtggagatgcaggggctgtttggtcccagggtaggatgtagtctgctgggggctgggctttcaaattggtgccgtgctgcagttgcctgttgctcagtgggtgtgtgggacccagcatgagttcccactctgaagccagtgctcttatgcagattccaggcagctccctatgccagtcccagggcctgtgggagttgaggaactcttccatgactagaattacaggagtctgaggtgagaatgtaggccactgggaatctctcaccttttccctgcaccgaggagctgctccaaatctctggctaatgctggctggactatacacctctcctctcattccttcagtgcttcaggtatttcctgtcacttatctgctgaatttcagcattctctcttaggtgttctattcaaaatgtggttagctattgactattttggttctttgtggagttgagtgtcctgtgcctctagtcagccatctggcacccctctcccatttttgttatttctttgcaaattattaactcattatcaaggtctcattaccttcctcactcttttgccttcttttcttttttagttcttttcagagttgatcctgttgagctttatagtactgtttttcttgacagatcagggataatgaaacaaggtgattgaagatatcaccttcctcagaaagtttggtatgacaaattcagctcccttatttgtttcacctttgagcaacattgccctttgatctaagcaagcacggtctctgtccctggggcacaggccaagaccatgggttttagggggcatttgtcaaaattttctaagtgctcttttagtgcctgggactgagtaggcctggcagtgccttccagatgggacaccctatggctttatgtgagccttcattcctcttttcccttttggggtactctcagactttcaagtctgtaacaatagtgttgaccagaagcccaaaaatgtgagaatttgatcctgtgggatcatcccaggtttcttgggtcggccctggttcttgaagggcagcctggcaagtaggcttctcctgctggctcatgaagtatgtctttcataggaatgcataatattgggctaccaaaatggaggcaacattctgattttgggtgactaactcgtgtcagaggcaaggaaagcttatggctgtaggctaccaacatagccacttaccattcagctggagccatttttgtgggctatgcattatccctcactcatcccggttctgactagtgctgtacctctggttgacagttctcaagggttgaggccacattgaggatgtctgggacctctattgcctctggttgtggtagtatcatcagactttcctgggctggtcttaagccatgctggacaaaggacagatgttgttttgagcaaataaaactgttcttcttgctctactcccaggcctcttgcctgtccttactgtggtggggtgtggaaggcaaggttgtgatataaccaacattgaaagtgatcacattctagaaatgatgtgattatagtctaaaaatttaaatataagatacgattggaagatatgttgtcctatgtttatgctgtaaaattcaagacagtaaatttaccagaaaagcaatgataactcacattttcctgcatactataaagactttcatttatagtcatatcaaaaaagcacaataacaactttgaagaaagtcattgaaagccagtattcatgggaggaatgaaggatgatacagtgccatgagaaataatgtaattagtgttaaataaatagtacagtgaactgcrgaagaaacaagatctatgttcattgataaataaccacatctcatagggtctcaggagtcttatatttttagtaaagttgcttatatagacagggagccccacaaaaaacatattttcctgggtaccacatgccataggagtagacttggctgagagaaacaaaaaagaggactttggagttgatggataattcctcggcttctgaacctcacccttgagactgaaatcaggtatctgagaattctgaggataaactgaagcaggaaggacatactgaagacaatctaagactgaagtattgccaggtgaagagcaagaattgtcactgagcaaagcaacatcttaaacaggaaagtagtagcttacttcaagtctgctggttaaggtagggctagaaatgcaataactagtggtaaagttggtggtcaggaagttggaagcaggttggggcaaagtgtagtgagcatttcatttgcacagattagaactaagacaaatagtagtgtgacctgtggaaacccttttgtgtcaggtccggccaggggcatggggcagaaatggcacattagagaaaccatgattagctaaacatgagaattaagactatctgctctttaaaggcaggaattcgcttttatttatcactggaaccacagaatctatctcattgcctaaaatctagcaaaagcacaggaaatacttgtgggatgaatgaattaaaaaactcaatagaaagaacaggttgtttgattttgaggattagagaaatgcagaaaacacatctatcaaagtttatttaaatctccatgagaatgttctcttccacttaaattagaaaaaagtgagtcaacatagttaaattggaatttgaaatcataggagggaaagatcagcacaagggcaatgtccttctataggaaagtcaggctagggttttgtttctcctgaaggcactcattctcacaaaaaagatgggactgaatccagaggttgactagaaggtaatgctttctgttgctattggtgggacaacttttcttctggttcaagacacaagagttaactacaactttccattatggtctcctttatgtttctcttagagagtgaacagttctattttcatcagtaatttccccggaaattccccggtttctctgattctgttgataagacagaatcacacaactccatctggtcctgcatctgtgtgtcaccatctgcctrtccctgcagtgggaataatattgttctcagcagagttttctgtgctagccctgtagatgtggcaatcaagtcctcaccttggattctgctgcttggtgggtctgttgtcactttgagttgtgtttaagtatttattacccataggatgaaggtagaaaaactaactgcttatctattctgacaacgtgtccaaaagtgagggcctacagaaaacggaaagctaaacaatagattgatctgcatcctaattccttccctccctgccaagcctattcatttactggtggtaattacaggttgggatcatattggtcatgtctttaaaattgatttatgtcatcagctagttagtagaaagattctatgcaaaaacttctttaagagcacattttccccaaacctactttatacagcacatagggaatgtacttatctttatagctcttttgtcatccaccaactctattttagtcaatttacatccatttaatttatctcaacacacacacacamaaaagattattttataacttacattgtaaactgtagtatagtatttggctgtgattttacagaatagtgggcgccccaccaggtgggcactattcactatcttgttgttgtcctggtaaggctcctgtgatgtcaatcatttactgaacaatgcttccctatgggaagcagttcatggctcacccaaggcatgaacagctgaagctccagatcttcgtctctataccctttcatgtcaatgaaaatagaacaagccactattaatattccacaggatggcccctctctccacccatttcttttttttttttttttttttttkaracggagtttcgctctgtcgcccaggccggactgcggactgcagtggcgcaatctcggctcactgcaagctccgcttcccgggttcacgccattctcctgcctcagcctcccgagtagctgggactacaggcgcccgccaccgcgcccggctaattttttgtatttttagtagagacggggtttcaccttgttagccaggatggtctcgatctcctgacctcatgatccacccgcctcggcctcccaaagtgctgtctccacccatttcttgatgagaatccacactcagccttttatctacatatgctactttccctgccttcttcattcagcaacctctctccaggatttattcataatatacaggtgtgccttagaattcacagaacttcataaatactaccaaaaataacatgcttggaagcagtagagaagagcacagtgctcacatgaactagtttggtagtataattcctgaatactaagattgacacatacaaattctgtggaataactgccagagtccacccacaatccttacttcacatttgaaacctggcctcagtcctgacattctacaagtgtgtgtgttgagaatgagggcaatttggctttcacaaatgaagcaaacacatatgtaactatagtgtttcattaatgctatcatcaagcacttaataaggaaaaaattgttttacccgaatttataaaataaattatgatctccaaagagtgtgctggatgatttaaaatcagaataggtgtaaatagtaaaatattgattccatttaaaaaacatatatttgttatttttgaattttctaccagttaattcaaaatttaaaaatacgtgttattgagacttctctttaataattcagtataacaaaatgataaggtatgatatattttttatctcacaattgattgattttattttgtattgctctcatttgtatggatcagtattgattttcttcttttcttacctccagtttcttcagagtttatcagagtctggctcaatgtgcctttcggtgtctccttgttatgcaccattaaggccgtctctgaggctgattcaggagtaaggaaggatgttacttgtckgctttcaagaaggtgcagttatgtgttcatttttaggacatttagaattcatgcttcagattattgtagatggcacattgcagaacctgaaactgttcatgttgttttcactccctgcaaaaacagagcaatttagtttttcctggtaaggtgaggtctattcgtcttctacaatttctgggaacagaaaatttagagtgcatttttcccctaattttctgactgttataaattgaaagcaatataacctaaagmaacacattgaaaatagatataaaaaattggcaggcaatatagtttaacattattgaacactttttaagaaccaggaactaggatgagggcattccatggattatctaattgattctttacagcaaccttattttcagatcctcttcttatattaattttacagatatgcaaattgaggcttagagaagtgattttccccatggaaaatggatatggttagcatgacagggactcaaatgtaggctatccggctccacaaacacactgttaatctctatgctatatagttgcattgaacagttgcctaagactaatttccatagtagcttgtttaagcatttaaaccacaagaaatcacttaaccttgttaagtgactttagacagttttagaccttggtaaaatctcacttacagatatattactcttatcatttccatttccatttcaactattctcacaaaatatttatataaaactaggaaaatagggacacaatatgtagcrtgtctacacacacacacacacamgcatacactaaatattgtaaaaagtgtgagacagtgaaaagtatgagaaagtaaaaggccatatttgagagtatgagaaattttagcatgtgaatatatatgaaagagatgaagagatcagtatcctgttgcatgcctgtaacttaygcatgcaacctaattggaaacttgttaaccaatcacactattcctgtttcgatactccctaataccagtgtgtataactgtagactctcagacttctgttggatattcccttcccttccagtaactttaggaaactcccaaattgtctaacacatcctcagagctgcctcaagttgctcttggctttattgttgtcccttcaccctggactatattgcttgatgcctcctttggttgatgtacttctctcgcctcttgagggatgctwgtttttatccatatttcaaggtctaggaaattggtcctttatttgtttcacagaagaaaggcttctgtttcacagaagagaggcttgggcaccaaatgggccttgtatatggcgcatttgggaactcattccagaatttatccaaacagcttttttagttatacttactggcttttctttttcaagacacactccccagaatggctggtttgggtcaagttctgtaacagccaccaggccacactgtaactaataaatcccttcagaaattcttagtccaactcaccatgcmtaaggcctttttcctccaaattgcattgtctcccaggaaccctagaatacatcttgttagaatctcttggttcttccttcttctttatgcctaactataagcacaaatgttttgagttatttatcaagaggattctatcccctttgcaaattaatggatgcaaataggaatggaatttgaaggagatgagtcaactatctatacatgcttgtatatggcccatctgggaactcattacactgttaaaaggtattctctattgaakaaatctgcttatcagccagtaaggggaaaaaaaagaggtgatttatttaactactgtatcttgttgcagtatttgtgctttttaagattttgcacaaatattgcaacaagattcagtaaaaataaattagtaaaagtcttraagcaaagactttttgctttgcttcagattttttgtgatggtaaacgttattttgaagggtcattctgaagggaacatgatactcatggtgaagataggcttaagcctaaaatttttactgaacaaacttactgcaagtctacctcactattaatacatgaaaactttagtgttttttttttttttttgtaaacagaatttagtgtaagttgagtctgacttaaacctcaaccaagggagtgaagttattgatatcttggcagtctgcttttcactgcttgttcaggcccttcttatttcatggctggaggagttttatcacaatgacatttttgctgatctaatgtcacttccgtcttctcaactttgtcctaaaagagctgctgagatagtyggttttttaaaccaaagttacaaaatcaatagtgcctggtagattatgctcaaaaaatgtttgtttaatccaaatttgaataaaagttttaatttggtgaatcagagttgtgcctgtctcatatttatccatcttcatattcttattatttctcagaaaaagttcttccctcatttcaattaaacccaataaattcaactcaagtaacccaatcaatccaactggtccaatccaatgaattcttttttattctacttcattccaataagccttgctgagcacttttgcacactaggagctgcttcatacatcttagtaatttccatttttaaatctagtactctttcaatttgccctgaatgttgatttatgtctatcaacagaaattatttaattttacaaccttgtgcaaaactggctttgtttcaaaggttacccagaacctttaggactaactaaatttacacatgccagactaaattattattaatttttctaatatttcttagtttctaaaatatttttcttttctactatctaatcaaacttagtgtaatgattgctttccctccttagagccctcaataagtcctgaataattgttgaataaaagtggaaaaaaattttgtcctgctgggagtgccattgactaggaaaatgaaaaaaaaagaaagaatagtatgattctcttttatacatactagcattgctttcagtcaatagagccaaaagtacagagcctggtactataataaggaactaagaattagaataatttacaacagaatttgagggtttgttgtgatatttagacactagagtttactttgcacagaatttggtgtaaattgaatctgacttgaacctcaaccaagagagtgaagttactgatatattggcagcctgcttttcactgcttgttcaggcccttcttatttcatggctaaagggcttttatcacaatcacatatttaaagtgggcattgtaataaccagctggatttttaaatttttttaatttttarttttgtggatatattataattgtacatatttatgcagtacatgtgatattttgatacaacctattgtmtgtttagttccagatattcatagtgctggagtagggctgagaagcaaatttgtgattataaaggtcattttgaagggtcatcctgaagggaactctggttttaaaatattgaatgataaatgtaactgaagagttcattagatataagattagaaaggacaaggaaaatttatgtctgaaggaagaaaataagaaatgtcaagcccattcatactttcaagtgttggctatattaaagtttgaaatggtgatgtgattatgagaaccagctaaaataagctcaagaaatattttatgtgaatttctgtaccttctttaaaatattttgttgttatagaaagttttaagcagttaataaagaagtcaatagttcagtgaacccccattttactcatcgcctagatttaaaaattacaactcacagccaattcttttttttaagcctatattcccagctcttaattctttcatttgtttcttaaatattttaatatgtacttctaaaaggtatggactcttcttatcataaattcaatataattgtcagacaacattaacaatacttaatactatccactgtttatattactatcttataaatgttttgcattttgttcatagtttattatttgaatcacaatccaaataaggtctagacattgcaaatgattgccttcctttcccccttgtaattcacttgctgcagaaatggaatagttttctctagagctttctgcaatctggattatgctgattgtctttccatgatgcgttttacatatttatcagtcccctgtagtggctgattcatctgaatcatgttcagattatgtgcatgtgtatgtgtatttaatatatattttcttttggcagggaggcaagactagcttgtaggaagtgttgtgttctttcatcagaatatgtaatatgtggttatcttttctttttgtgatatcaacaactatggatgatgaacccctacttgcgtaactcattgttaaatggtgatactccaattctaaaattccttcttcatttatcagctacaatatttctattaagataaacttcctttcatctacctttgaattattcattgatactattttcataagaagagaaagataaagaattaatcttttcatttatttgccaatttcaaaataatgatttggtttacaagtatccctccgtggtgaccagttatttatattagcttaaactcttgagtttaaacgatgtgtgtcaattaattagttattattcttattgatacacaattaaaaatatgctttaaatgttgcttttatcttttggtgtctcattgaagcacttggcagcaccaaatgggaaaaacgctgttaaataagagttgtgtacaacttgcagaatgtagttagcagaagagacaaccttttcttgcctccacaaaattctgtattcattcttctttagaactttggaagatgttttgtttgtgttaaaggactaaaacatccaggtaagtagacattcttaaggaacatctacaacttttggtaaaatataaaggccagagcaatacaaatatttttaagttatatttatttaatgtatgctttaatatacacatcaatgagttttaacatttggtagagtatataatcaccaccaaaataaaaaattatttctaaaagttttcccatttccctttacaaccaataacttgtctatattcccaatccctggcaacctctgatctgatctttgtacgtatagttttgtattttccagaaagtcatttatataaaatataatagaaacttagagtatttttgttgcctttygtgttttgagtcttttacctagcataatacttttgagatcaatccaggatgttgaacatgttagtggatttttttttcactgccaartaatatttcattgtatggccacagcacactttgtttatctggttgatcggcatttaatgggatttcaatttttggcaattatgaacaaagctgctataaagatttgaatgtgagtctttgtgtaggcattcattttcatttctcttaagtatatacctaagaggaaaattagtaggttgtatgataagtgtatatttaacttgataggtaattatcaaactgttttccaaagtgtttgtactattttgcaattccaccagcaacatatgagggctctagttgcctttcttctaaccaacatttggtattatcagtcttttcaattttagtgattttattaggtttgtagtggtatctatttgttgtcttatttgagttttaagagatttgtttctgtgatttctcctagaagttttatagctttaggttttacatttagatctgtgatgcattttggttttkgtctttttttttttttttttttttttgagacggagtcttgcgttttcacccaggctggagtgcagtggcactatcttggctcactgcaaactctgcctcccggttcacgccattctcctgcctcagcctccagagtagccgggactacaggcgcctgccaccatgcccagctaattttttgtattatttttagtagagatgtggtttcaccatgttagccaggatggtctcgatttcctgacctcaagatccacccgcctcggcctcccraagtgctgggattacaggcgtgagccaccatgcctggctgggttttgtctttttttcctcgccctgtcttatggttctgacattttgatttttattattgttgtttgtatggcttaaggtaagggtagaggttcacttaatttgcatgttgatgtacaattgtaccagaatcatttgttaaaattgaatctttttcccattgaattatgccaataccttggtgaaaactttactgatcatgtatgtgtgtgtttctggattctgattctattccattgagctatgtgcttatctttatgccaatattatactttcttgactactgtagctttataattttgaaatcaggtaaaatttgagtcctccaacttatatcttattattaaaaattattttatgtcttcttggtcttctgcatgttctaatatgttttagaatcagcctttatatttttacaaaaaaatcctgccgggattttgattagaattgcattaactttctagatcaatttgggaggaattaactaacaccttattgatattaaatattctgatgtttgagaacagtgtttctttgtatttacttagatctactctaaatccctcaacagtgtcttgtaattttaggaggacaagtttttcacatttttaaagttttatcccaatatttcatgttttttcatgctattgtaagtgatattttaacaactttagtttctaattatttgtttttagtatataattatatttgaatacaattgatttaataaataaatattggtattgtacattaattgtgtatcctttgactttactaaactcactggtagcttgtttgttggattctttgtggttttctatgtagatgattatgccatctgtgaatagagacagttttctttcttcctcttaagtctgtatgccttttatttcttctttctttatggcttagtttaggacctctggtacaatggtgaatagaagtagtaagagaggaccttcttgctttgcttccagtcttaagaatgatattagttttatgtattttatagataccctttattaagtagaggaaattccttttagtttctagttcactgagaattttcatcatgaataggtgttaaatttggtcaaatgcattttctgcatcaactgagatgaccatatacagagttttatttttttagtctattgtcacagtgaattacattaattgattattaaattttgaaccgaccttgtattcttaggataaacactagtggatcatgatattttattcattttatgtattgctagatttgatttgctaatgttttgttaaagatttttgtacctacattcgtcacacataaacttggtcggtaatttttttgtgcataaagttcttgtctggttttggtatttggataatgctggcctaacaaaatgaaattggaatgtaatacattttcaaaggttgtgtctacatacagctaaataaagtagrgttctgcaagtttagttggcaattttagactgcataattgtggccaaaatttaaaaattaaatattaaggtttctatttcttccattataatatttaataacatggtattatgttgtacttgggaaaacactcagcctggcctttgatcctcagtagatgcttgggaagtattagttactggtaacaatataatagtaataattatagtgacataaccatcatattttgaacctatgctgtacagaaaatagttttatatagagcatctcagagaagactggacataacacatttatacccaattatgtggcaatttactacaaaattattttgattttaataaaattttagagataagaaatacatttagtatagctcttagaattctaacattgacaaaccttttttttttgttgttgttgttgagacagagtcttgctttgtcacccacccaggctggagtgtagtggcatgatctcggctcactgcaagctcagcctcccgggttcaagcaattctcctgcctcagcctcccaagcagctgagactacaggcatgcaccaccatgcccaactaattttttgtattttagtagaggtagagtttcaacatgttggccaggatagtctcgagctcctgcactcaggcaatccacccatcttggcttcccaaagtgctrggattacaggtgtgagccaccgcacccagccgacaaaccttttaaacatttctaaaatgcaacatttttttctatggctatcataatgctaaggtagcagaaaagcaaccatgtttatttttatcttaacattaattttcatgagacgggaacagtagaagctaacagcatcaaagtttggtaaactttccactgcactcttgcctgatggatcctagtgatgcttaaatgtgggtgtctaagaatcagcagtatcaacatcacctagatgttagtgatgcaaatttatgcctggaaagaggagaaatctgtgttttgacaagctggtaatactggtgttcactaaagcttgggaagcactagctgagtatatagtcatcagggtatgaggtgattggaaacactaagagtccaacatgaacatttagaagagagctggttctctcttctgagttaaacaccttgtgttgttagatgcagtctgaactgcagagaaagacacagttacttgtagcaggtagcatgctcaaaaacatgattccccttttttaaaaattttcctcacttatgccatctgcataaagtgatgcttagaaaaaaaagcagaatttacagaagcatagagaaatttgcttcaaaatgagattcagaactcaaggtgctgtgtttacagtgtacttttcctaagaccagcacatcctactgtcaaatccctcccaaatatttgaaaacttgccaatatttaataggcttgtttttttttctaggtacatatcctttgctgtttctcttcaaattataagtccagtagaatttacaaataagctaatagttcaaaatctaatctagaaaggagaagatgaacaatagtaaaatcctctaatgccagcttcgtgattttatttctcctccgtcacagcttggttgactttaccagtgttgtctaattctttaattattctacattgtgttctaaagaacagtgtgttcttcctattgtgcacattgcatcattatacttatcaattaagtcaaaggagcttgaagatcacagccttctaatttagaaagatattctgagagaaaaagaaatagaggatgattcattcttgtgggtatttgcagtttaaattacctaaaaagaatgacaggctacttgtgacttacctgatcctaggacttttactaggcaaataatagatttgaaatgatgctagaaaatgctatttttaagtgaaaaattgtatgctgtcttttcataattaaacaaaatagaatctgaaatccaatctccttggctttctatggtgggaatcaaggattctttttattattaatctgataaccaaaattagtttacacagcagtctggctgctcagaatagaaaatggattttattcatttatttatttagatagaaattactctttggcattgtaaaagagataaggcatttgtgggactactcagtgggttatttcaagttatgttgctgtgtattagaaactagatttttctgtctgaacaaattattcattagtgaaatgttattcatagcaaagagtcttacacatccaggggtcactaaattgcaaagtatttgaacactgcctaatgaaatgtactctaaaaagtcaacaggtgtgtatcgagtacctactatggtcaagaactgtgaaggtctttgattttgccctatttgcaagctaacaagttagtctgccacataagaaccctggaactttattactcagcactgcagggagcatgggctttatgtttgcattggttcagtttccttccaccccatcatctcccatcaagtcccatgggggttgtggaatgacccaggtggatgatgcacacacaatgggtttgtgtcatagctgaagatcactgaacttaggaatctgtcaatctcatgaagagcctgcttgctaaacctgtccaacctttgctctgtggggagacttgatctttattctgatcagaaaacaaattgccctctgcctcggaaggggagacactataccttccaaggttgtttgctgtacaaacatcattgggaagacagtggaaggatgtacagaaataccatgaagaattgtctgtcagtgttatgtacttattacaccagatgctgtaagggataagaaaaggggaaagatacaaatactgtgccttggtcttgatgggaggaaacctaatatattggaaagagcttctttgggaaatcacacaaatggacrctccagtcccagctctgttattaacagccatctgatttcagtcagttttttttagttctctgagcctccattccttcatctctaaaatggacactatatctatcttcatggatttttctgaggatgacaggaagtaaatatatgacaaattgtagggcattcactggctgatataatgaaagtattaagaagctaatgagaactggtattcattaggagcattagtgcttacaaataaggaaaaagagaagaatatacaaccctgtgctgaacataactcagcttgtctttcaagggagggaaccagagccattcttatgcaaccccgatgttagacaaaaggaatgtacctgttttctagtaagagaaggccactatatcttattaggtatgctaaaaaatttgttgttaactttattttttctgtattattcagcaaaagttgaaggtataaaaggttttaaaatattttaaaataatggtttatctacttcaagaattttgcaaaatgttggagagggccctgggtaatgaaatgccccacagcgtacaatacccttgaatttcctcagcaatggtagactcaaaggaaaaactatatattgatagagataagccaatgaaacatttgccttgttaggacagctgaccatagctgatgaatagcaatacaatatatagtccttctgtatagaagcactttatgatgactcaataacaacttgaaatagaaaaaggagagtttgccaggaggtaataagaagctagatatcccatcatcataattctttttgcataactgtacccactctctataaaatcaagtgctgtgaaaaacagattgcatgccattgatacatggaagcatgttgtcacaagcaattacagcatgctacattaaayaaccatgtgctgtgttatgtcttaggccacacgctgcaatgttctcttttaatagttataatgaagttggtttcatttttcaagtaactgggacttaaacatttactgaagactttaaatagcaaggccaacattttaatacttagactaacacagtttgataatttaagaataggacttagaagtcgactgtgaaaaacatttaataaaaaaataagtaatctgcatactttattagaaaaataagtcactaggaaaactgagagtaaaatgtctagtttacagggatgttctattggagaaatcttgatttataaatatctttgaaaatcacctaaaaactcttgggtatccaaacagtatccaccaacaaaactaagctaagatgatcttttgtggtagtgtttacacattagaatgartttgaatccccttgaatctttcttagaccagctttattatgacgatactcaccatcactacttcctctggaatgtcttaatgccaggtcttggtatgggttcttcatatcttaactatttaaagtttatttatttgcattttagataattaattgattcatataatttgtaccagacattttcagaaatacatagtaaaaagtccccctccagcttcttgctctttcccactaaattctcattgttctcaacccctaaagaagtagtcactgtaattagtttcctgtcatccgccagagattttttaatatgcaattaaatgtaagaagctgtctatttccacacagcctcacaatacagtgcattatccaacataaaacaatttacacattagcatttttattgccattttatagataaaactggggtactgtgaagttttataacttgctcaacaccatctaacataaaatcgaaggtgagaggatttaaaatgagatctatttgtctaactgcaaaatccatattgctcccttataaaatgtgaacaacttacttgatsgtggatgaaactgagagggccaagtggcctttccaaggacacaaaagaaggggatgcgggttcagaattaagaatgaatcttctgatgctttctctagtattctgtccattatatcatgcagtttctttggatatttaattttctgttggtgtgaatttctatgtgtcttgcctttccattagaaggaaattcaaacttaatctttctagcattttttttttcattctctgggcctttaaaaggtactttaactagttcactatcagtatattttaaaatttatttttaaatttatgtaacagtaaaatccacactttgtagtatacagttgtatagattttgacaaatgcttagggtcctgtatttacacaacagtcataatatggaagagttccatcaactccccatatttttcagactgcccccttgatgttagcactcatttccactccaacccatggtaactgcaaatctgtttctatccatctagttctgtcttttccagaatgttaaagaagtggaatgatacaatatgtactttggttggacytctttcaatgaacaaagtccattgagattcaccaatattgttgtgtgaatcaatatttcattacttttgtatcaatgagtaatattgtattgtagcaacattccagtttgtttatccattttccagttgtttcaggttttaatgattatgagtaaaagctgctataaacatttctatacaggtttttgtgagawcataagtttttgtttctcatgagtaaatacctatgagtaggattgctgggtcataagtagtatatggttattgtataacaagccaccaaacagtctcccaaagtggctatactattttatattcctaatcagccagtatttgtgacttctagttgctctgcatcctcatcagcatgtggtggtgtcttttgtaaacatttttttaaccattccaataggtgtacagtagtatctcattgtgcctgtaatttgcatttccctaatgactaatgatgttggacatattttcatgagcttgtcacctgcatgtcctcttcagtgaaatgtccaaataattgcatcattttaatattggatttttgttttcctattgtgtttgagagttctttacatattctagataaaaatctcttgtaaggtttttgatttgtaaatatttttccaagtctctggcttatttttaaaaaattctcctagtatgtctttcatggaaaaaaggttttaattttaaatgttcaatttatcaatttttttcttttgttggtcatgttttggtgtaatatctaagaaaattttgcctgatccaagatcacaattattttttccttaaattttcttatagaaatcttatagttttaggttttacatttagttctatgatccatttgagttaatttttatatatggagtgaagtagaggttgcatattttttcctctcttttttgtgcatatgaatagccaattgtttcagcaacatttgttgaagagactatctttttccattgaattatctytgtaccttgtaccaaagttcattgtttttatatacatgtgtatatttctggagtctcttttgtttcattgatctgtttgtctatttttatttgttgtattaagtagtctatctttgtaacaaaacctggtatcagacattgtttcctctccaacattcttcatctttttccaagtgttttgactacttctgggttttgaatttacatatgcatttatcataaacttgccatgactctttttgatattccctgascttcttgaatatatggtttgttgtgtgtcattaattttgaaaacttctagtctattattgttttccaaggattctaccttgttctcattcttacttcttctgtgatttcattatgtgcatgttagatggtttgatagtgtcccaaagctcctggatgctgttttattttatttatttttactttctttgtggtttattccatgtcatttctattgacctatctttaaggtcactactgttttcctcagttttttcaagtctagaaatgagctcatcataggcattcttcattcctcttactgtgatttttatttctagcatttccgttaattatttcttaygatcttcagctctgaagttatccttcttaccctacatgtttccccctgtttctcttaaatctttagttattttaactttaaatttagctagatatatttccaatatctgtgttatacctaagtctgatcctgtttaataccttttcacattgtgtatatttcttgatttttcatatgcctcattatttttatttttaaagcttcattttcatttttattatatatggcaagagacactaaggtgaatagttttatgcctgcagatggacatgtctttccttctgctaagtctttagtgtggggatttgagccaatctagtctggagttgagctggttttggatttgttattgatggataccttgatagaatcataggcttcaaattcctcttggtatattttgtgtttaggatgggagccaggttttctcaatatctgttccatcctcagccttgagtcttccctatcagctttgtcttagataacttcttctctgctgtcttgtctctcttctattcctcttccagaaatattctactgttgcttcttattcattacttgtcttcctgttggtgtgaatgtgggagaaattctctgttgttctgatgaagctttagtttaagcagacaatattaccctggctctcaggattataacttaatccttagtgtttctgatccttttctggttatttttagcccagcatgtatttctgcccttcctcttagtcgttaagaggtttttcctatttttttctccagacagaattagtttttaccagtgccctaagagccacagtatktgtccttccttcccatcccaaggctatggttccttctgggtgatagggaagaaggatatctgtgctcttcccacagtggctcatgtacccctcttccaggcctgaactatggggaatgttctctttgaactcacctaggtgttttgttgtctttgttgttgtttttcgatttggagcacttggtgaggtccatgaagaagagcttataagtagttgtaaactttttgtttttctccttccccaggggatccacacttttctctagcccacattgacttttatcaatttgttaacaattaaagctgaattcacttagtcttcctcyggcagcatctgcccttggtaagaaagtggtcatgttttgtctttttctccttagattttggactagttggttgacttgtgaccctagttctctgattggttcaaaaaagtataaaatttgaagtttctctggcttttgttgctgttttaagaaggtagtgacatgtttcacaactaactacattacaagtaaaaaccataagtatgtctcaatttcaatgtatatatatatgaaacagaatagttgcactttcaatcagacttcatctaaatgttcctcttggggatggccacccagtaagataattaatagactgtatgcctcaaagcatccaattcatcagggaatttattccttaccaatttagtcatgttctctgaattttcttcagaaaactagcagaaagctagagggcctaagatggtagaattgtaagcacaaatgaaaacttagagttttgaataagatgtttttggtgaaacaatgtaacctccctgtgagtcaaatgttctctggttcatggacagaaaataggaaacttccatttgaagtctagactatttttctcacttcatggcagatctataaagcatttcttgatgtatcaagggttttatgatcaccaatacagagaaaacaactcatgacttaatccattatttcccagaagagcagctgtctcaaggattttagaattgcctcttctgcactgcaggtgatttaagtgctgagctaaataagtaccaattttccaattttataccacttcagactgtgttgmtatttggcatctgaagaccaagttatccactcatttttatagtgtacaatttagtatctactataggtaagatgcagtttagaactggtaaaaatttatgaggacaactagttatcacacatgatcatttttcatctgaacctttttagctgatgtagaaagctccagataacaaattggttttaagacatatcagtgtgggaaatttcatccttttctgcttcagagtgctcaargctgagttattgctgaatctgggagaaaaatgtagaatgtcgtatcttctttacataagagtaaaaatatttagtgcaattgttaaggtgctgctctaaaatgtacatgccttgagcctggtctctgttctaacactagttttatgtaaaaacttgggaaagtcacttactccccttcatccycgcttttcttgactctgagataaaagtaataatattggctctttcagcttttgatgatcaaactatcaagttaggtcctaggctacatattaacaaagctttaagccagtgttagccaggtagtgggcactaaacaaagattggctatgtcacagtaggtggctagtaaggtatgagtggggcaggagagggctctctccacccaccaggaatgtcaggtgaccatcaggtgatggtcaggcagttgtcacattgtgtgacactctaaaataataattggtcacagccaaggccagggagaggcagtttcccaacagataaatacacctaraactggtaatcggcagctttcaggaattgggcaagtgggctggagcatgtgcattaagaggcaaaatggtgaagtatgaccttctggggccattccattggaaaggggaagaaagcctcaggtgagcttgtatacaacttcagtaaacacactgcgcatgctcacctctggtgctggcaggcactgtgcatgtgggtggcttaccctaagggaagaataaaaggaaaggggtgcaagatgctggaagcaggccagcatatataatcctaggttcaaggtcagacggggcacttgacctgcaagacaccaacttgggcctcttccaagtgtactttcctttctttcattcctgctctaaagctttttcataaactcccrctcctgcacataggctaagagaagagattaaatagaattatataaactgttcaattaaacagagacagcagaaaagagaaaaaataataaatagaaaacaatatcaaacatagtagatattaatccagctatatcaatgatcattttaaatgggagtggtctaaatataccaattaaaagacactgtcctcacttataagtaggagctaaacgataagaatacatggacacatagagggaaacatcacaaactggagcctgttggaaggtggagatcaagaggaaggagaggagcaggaaatgtaactaataagtcctctgcttaatacctgggtgatgaaataatctgtacaaccaactcccatgacacacatttacctatgtaacaaacctgcacatcctgcacacgtacccctgaacttaaaagctgaaacagaaaagacattgtcagtatggcttaaaaaacacccaaatctgcttgaacccgggaggcggaggttgctgtgagccgagattgcgccwctgcactccagtctgggcgacagggagagactctgtctcaaaatacatacatgcatacgtacacacccaaatcgatgttgtcagtatggtttaaagaaacacccaaatctatgtcgtctaaaccactttaaacactcaggttaaaagtaaagtgatggaaaaaaatacatcatgatagcactaatcaaaagagagttggtctgcttaattctagacaaaacagccttcaggacaataaagattatcatggatacagagggtgattatgtcacaggattcttcaagtgttgcttttccagctggaaacctctgtggctgtgggtgcctttgccggagttttgctcgggcctgcttggctcattctgcccactcagccaggcaggctgcccttggttctcactactggcctggatcccccgcctgccaagggtgagccaggcgcagagcagtgaaggatgtgtggggccagcgagaatggagtccagccactgcgcacagccaggcacaccagctactgtgacagggcgggcagctccaggcactggctccgtgcaagcctgcggctggatcagatgcaccacaagcggcttctgctgtgggcacctgcatctggatgaagggaatgcagtggcaccctgaagctttgagacaccagaaaccgcaaagccccaaagaagktgtcacagccctgtcttggggagcccctaggtctgggctccctgaagagccacagctcttctctccttattcccccaaggtggtgagcaggggatggggaggcgtgtttcagccctgtttgtgttacagctctttcagtccagccattcagcaagtcccaagttcttgtcccacacccaggaaaaatgaggtatgcggacaactggagggtgagccaggcagagaggagttttgagtgacagaacagctctcaggaggcctgaagtgggtagctcctttcctcaggcaggtcatcctgaggagtgtccagctcttagtggagaggagacccacagtgtgtagctcatttccgcaggcaggttttcccgacttctgtatgagtctggctgggggggggggggggggggtggggtgggggggggggttgggcttataggcttagaagggaggaagtacttgctgattggtccatgggtggccatggccgggcctggagaaagcaccttaagttctcactcccggcagcctcagattccaccaggagctgacagcccagcccccaggcttcaggccatccctggcttgaagatgggacttcactgaggacccacccctttctgcccagcaggctgtctgcctcttgccaccatcaacatgtcatccatggtccactgcgcccaggctgttcctgccgagggacacctgcaggctcacactgagctgccctcaggtcactggcctccctcccgagattgtcagcacccaaaatccagagggggctgaggtggcaggcggctggtgtgtcagcgctgcccggaacttgcgcatacccgggctgtgacagtgtcccggctcagccacaactttgctctgcctgaagtgggtgctgggagtggagagaggccagggagcagaagcaggcacttccaagcccataggggtttgggggtttcctgggccactgagagcgcagggatgcctgggtccagagaggcggctgggcaactgcagctgcgcgcggaagtgagaggctcctcctgccccctgactcggtgaggggggtgtgacttccgcctgttcccggcctgctggctcagtggagtgcgccagctgcgccttccctgctgcagctctggcctctccagatgggccgccgctgccgtcatttaaatgatgataacgagaaaaattattcaagaagataaaacaatcttaaatatgtgtgcatctaacaacagagcatcaaaaggacaggaggcagaaactgagagaactgaaaggagaaacaggcagacatatccactactatagttggagacttcagcacacttctatcagtaattgctggatcaagcaggcagaaaacaaggatatagatgacctgaacaatagctatcaatcaaattgayctaattaatagtatcgaattttctgcctggcaatagcagaatattaatttttctcaggctctcatagaatattctccaagacacaataaattctgtgctataaaatacattatatataccatacaattttgaatagaaatcatacgaagtatgttatgataccacaatgcaattaaactagagaacaatgaacatttttaaaaaactggaaaatcttgaaatctctggaaattaaacaaaacagttctaagaacaggtgagtcaaaggaggctcaaaagaaattaaaaaaatatgttcaactaaatattagtgaaaacataacatcaaaatttgtgggatatggccacatatgggcaggcacagtggctcatgcctgcccagcactttgggaggctgaagctgggggatcacttgaggtcaggagtttgaggtcaacctggccaacatggtgaaatcccgcctctactaaaaaaaaagaaaaactacaaaaattgtccaggtgtggtggcacctgcctataatcccagctactcaggaggctgaggcagtagaatcacttgaacctgggaggcagaggttgcagcgagccaagatcgtgccactgcactgtagcctgggtgacagagtgagactctgtctcaaaaaaataamaataaataaataaataactaaaaatgtagaataccataaagcagtgcttaaagggaaatgtatagcataagtaaatgtattaaaagagagattcaaaatgaataacctagacttccaccttaggaaaacagaagagcaatttaagccaaaagtaatcaggaaaagagaaatttaaaaattgggcaacttggatgyaactggaggccattatcataggtgaataaatacaggaacagaaaacccaatacctcatgttctcacttttaagtaggagctaaacattgaggacacaaggacatacagatgggaacaatagacactggggactactagagactactagagaaggggggaagggggtggggaggaggctgtgggctgaaaaactacctatcaggtactgtgctcactgagtggatgacaagatcatttgtacctcaaacctcagcatcacacratatactcaggtaaaaaacatgcccatgtaccccctgaatctaaaataaaagttgaatttttttttaaaattggagaagatgtcaacaaaattaaaaacaggaaaacaatggggaaaataaagccaaaagctatttctatgtaaaaatcaacaaaattgataaagccctcacaaggctaagcaagaaagagagagaagacacaaattaccaatataactgatgaaagagttatcactatagattctgcagacgtttaaaggatgataaaaggatactatgaaaactgtttttcatgcaatttgataacttagatgaaatgaagcaattccttaaaatatgcaaactactgatatttataaaaggagaaatagcacgagtagccctttacatattaaatattttgaattaatgacaacctttccaaaaaaaggcaccatgccaagatgacttcacagtcaaagctccaaaaagtaacatcagtgatccatattattttccagtaagtgaaggcagaggaaatgcttcttaactcattctatgagaccagaattccctattacaaatactacaaatcagataaaaatattacaagagagaaaaactgcagatcaatatctctcatgaacatataggtaaaaatcctcaacaaaatattagaaggacgaatccaacaatgtgtaacaagaactatacaccatggccaattaatattcatttcacagattcaaggagggttaagcttcaaaaatcaatataatcttgcatatcaataaattaaagaagaaaaatcatatgattataccattggatgcagaaaaagtattttacaaaatttaaaactgatttatgatttaaaatttttttaaaagcctcttgtcaaactaggaataaagcagataaaggacaacctgataaaaacatctataaaatgcctacagataatatcgcatttaatgttgagagactggttagttagccttaatgttgggaacaaggcaaggttgtcctcctctctcaccactcctattcacccttgtagtatgggtagtagctaatgcaataagacaagaaaaagaaataaaagatatatagattggaaagaaataaagtttattttcagatgacatgattgtctacaaaaaaattccaaaacatctgttaaaaacctctgaaactaataaataaatacagcaaggtcacaggatgaagtccaatatataattgttgcttaattatatgtcagcaataaacaattataatttgaaatttaaaaataaaaaaattaatagtagcacctaaaaataaaattcttgggtataaatcaaacaaaatatgtacaggatttaagtgtggaaaattctaaaacactgatgagagaaataaaagatctaaatgaatggtattgcatgttcacagataggaggactcaatattcataacgtgtcaattctcatcttgctctataaattcaatgcaattctgatcaatgttccagcaagcaattttttttttttgagacagcatctcactctgttgccccagctagagtacagtggtgcaatctcggctcactgcaacctccacctcccaggttcaagcacttctcctgcttcagcctccttagtagtagctgggactacaggcacgtgccaccatgctcagctaatttttgtaatagtagagatggggtttcaccatattggccaggctggtctcgaactcctgacctcgtgatccacccacctcagcctcccaaagtgctgggattacaggtgtgagccaccacgcctggctccagcaagcaattttatagatactgaaaactaattctaaagtttatacagaaaagcaaaagacagaatagtcaacatagaatattgaataataacagattggaatacacacagttctttaaatgtaggttatacatggtgacttccttccaaaaataaagtatggaaagataaaaaaaatgtatagaattttttctccacttcagagtggaggaatctgacaaacactatctgagtcaggtaattaagattaacatcatcaatgatgacagtatgccttcttgatataatgtaatgaaaatggtactttaccttgtgaggttcttccccaagccccattttaatcttgaggaaaatatcagacaaatcccatttgaagggcattctacaaaataccttaccagtacttttcaaaactgtcaaacttatcaaaaacaagaaaaatctgagaaactgttatagtcaggagaagtctaaagaggcatgatgactaaatgtaatgtggcatcctgatatggcactaaaaccaaaagagaacattaggtaaaaatgacagaaacgtgaatgaagtatggacttccgttaaacataatgcatccagcttggttaattgtaacaaatgtaccatgctaatgaaagatgtgaataataggggaaactgggtgtggaaatagtaaaatatcctgagatgggagttggtgttgagcaggaccatagccacttcatcctctaaaacaggagaaaaataagtatgaacagaggtctttatttttttcttgaaggagagmgtggggcaattcaagccagattagcctaattcatttctctttgtgaagtaggagatcacatcatgtgatgggaaacaatgtcaaaatgttgggctaattcaagtggggatgttttgggaaagacatcaacagaatgagaatgaaatttgccagrgggaatgaagaagatctgagtgggtcactaaaattataattctcmaatctgtcatagcattgactcagtgattatatagtattctctaggacctccaggtcgatgaatatgagtgcagcattggyaaattgcaggactgagtgctggctggaaatttgtagggccaatgtagcagaaagaggggcaaggaagtcaattgagattttgggtgggagaattttttaggaaatcagcttggagtggagatgaagaccattagaggtgatgaggtagaggaaccagtaggtttagatgaatagatcatatacagcaatctcctaggctgatgctaggggttggcaaagaattacggtaatgtgggtgagagttggcrtggtttaactccatagctatttttttaaaaattttctcgaatttcttcaatcccacttaaatacagyaactaatctgcatcgcaaagccttctacttctcttatattttagtatacgcttggctgcattttagatgacatrctcatattctaatttttctaggaattcagtaggatttaaaggctatgatgaaagatagtcttggctttgtgaggatatcagctaaaacaagktaataaaaaattctggatgatccatttttctacatattatactttgacagaattattagtgaatcctggagtaaagcacattctgttggctcatgtagaataaattcaaaatatgagaaatttaaaatgttttgtgtctacacataacctgaatataattaaggccatttctagaaatgataagatatacaacagaaactattgacccaagttgttctaytccttataagttggatctggatatggattggtatagtactaacaatgctcttaaatactgatgcaagttagaatactgagctttaagatgtagtacttggagttgtagaagggtgtaatgcaaaaggaaaacagaagttaagcatgcatgtggcagacagatgtttaagataagagtcagaaaatctgaattccgtgctctgattattaaagtcctgcttggccctgagtgacactcagggttgtagttccatgactcataaattaagaggattgaagaaagtcatatcttagatccttcctaactatgaaattctattacttttctatgtcaaaagcatatattgcttgtttttaaaaaatactcgaaatgcctgcatttaattttttttggcaccttaatgaaccaatatattacaatgatacagacaaatcagtgcyacagttgcaccaatctttattagctttcaaatccaatctagacttgcaattatttcattccatctctaagttcttkgtattgaggcagaaaaatgaaaacaaactctttgaacaatgctagatctttctggagaagagatgttaagaatgtagatacgaggcagggcacagtggctctgtaatcccagcactttgggaggccgaggcaggtggatcaccaggtcaagagatggagaccatcctggccaacatgatgaaaccccgtctctactaaaagtacaaaagttagctgggcatrgtggtgtgcacctgtagtcctagctactagggaggctgaggcaggagaatcacttgaacctgggaggcggaggttgcagtgagtccagatagcaccactgcactccaccctggtgacagagcgagactgtctcaaaaaaaaaaaaaaaaaaaaaaaagtagataccgcttgtaattgattaccttgtatccaaatctacatgtttgggacagaaaattactttgaccaactttgttttttaccaaaaaacaaggaactggaggctgaaggctctctaagatagctagagtatcaactattttttccctgtgaatgagataattctacaaggctctggttctgctcttgcttctggcagcagatccagttttccattatgggtggggcatacactagcaaacatagctttcatcctgcttcatctcactgtgtgaatggaagcttcaatttgagaattttccagctttataccagaaatgtcatcactctctcaccttttttcttcaagactttaatctgttaagtaaataagcaaactggttccaatattgaagcttgtgacatttggccagtcactcatctctaggctgagttgcttccttaccctctgtgccttagccaggctattgctatcatatcaaaggatcttatcctttagtccatatttattaaccttctgggtaaattctttatatagtgtttaatcagcagccttttgtaaagtgtaagtaaattacagaccacttatctgggggcaatcatctgccatttttcagaggaaaccaattggatttcttttaaaattgttggtagaatgggcccatacaggatacacttaatttaatcgcctatttttggttgttcttttattacaagtatgaatagaatttctagactgctatatactttcctttctgctgatgacttgatagtggtctgaaaagcatgcatttggtgagggtcagtcatgaaatagtgcctcctaatttctatattcacagaaagcacttggcaattaaattccttggaaagtctttaaacctctcctctgtttcacaggtcactgtgtcattcaacagagaaaagcactgtagcagttttataggatggcagaggaaggagccactcttacagggaagagagcagagaacattggctaaagcaaatgttaatggcttaatggagttttatacactcagcacctttggtactgagatgtccagtaaaatcatttgctccagttttctgaggttattagaaagctttggattctgtactctaagaaacttgatagaggcattaaatatttgatcaaattaattcatatgttgctcctttctttctagcagtctctgagcgtgtgctgggtggctatgtgcgaggggctaccctaagcaataaattgtctggcctgctcatttattcctctgtgcggaagattagtaccattttgggaacagagatggtaaagtcaagaactccgttggaatttggggaagaattgttcttatgtttttctaattttcttatagagcgacaaagaatattgtatatgactctcattttggattagatcagtctgacattctgagaaatataaaagtattatagcatttttaactttcagtacaatagtgctgaatattttcctgcactgcacaccattcttaaacagcttctcttctgacaaaaagatgtatcttgcagccctaaatcagcctctgactgatgctgacttaataatggcatgaagccacaattttattagctttgaaatggaggaaccccaaataattcatcatgatgttatgaatttaatttcttttattttgctcacaatggctgacagaaagcagtcagatactcagaactacagtagagcaatcatttccccctggaatgattacaactcacaatttaaatatatatgaacacatctagaaatagttttgaaaattaagaatctatatcttcatcctttcagcaagtttactggccgctttcatgtcctctttattttccccttctattccaccttttgacactggccttaggaaggaaggacataggcttttggtctttcaggaattaaatttggagacttttcmcaaatattacttgtgattactatgaaatccacaagataagctgccaccttattaaattatctgaggaaagccccagctttttaaatcttcttgactgattttctttatattcatcaaaatttcttttagatttggacatgggtgagatgcttttcttgattgtcttaaccagtggctgactggagatatcgattaatgctcctccactattttgcatgttgggtgtttttcttcccctctaagctccttcatcggttttaactatgttttagctttttcacctctagctaatggagatactcccaggaatgtaggccgatgacatacaggctggaatggtgccagcagacgcattaggtttcttctctcaccccaaaccaattgtctcgagttttcaaatgagaattttgaaatttgaactcagtttaaaaaatagaggcaaattagctctagagtgtagagagtttgcatctttcttggtttctcacatttatccttttctggggagagtttacagatggaaaagtgatatgatactgatgtcagtatggaacaggattcttatttgagcatgatcaaagtcatgttgtttaaagattttgcactgcctttgcatcttattcttaagagcataataaaacagcttaatataatttacagaaagtttaatagacatcagaatagactattgggattctagcctaaatgtatatactcataacagcatagatatccttcagttaacagaatagggttttcaaaatttatcttgtggaataaatgacaaaaacacataatttttcagctgttacgtttatttttttcttatttattattctcttagcaaaggaaccacagagctggttcataattaggattatttagacatttaaatattgccatttttatctggctatgattttcttgaatttcaaaacagcatatttttcctagctggggataaaaggaaaatttacctcttctttaagcagaggtcccaccaagaaagggatgtttaatttagtggtcaaattagattggtttcagcatctgtacttgtaatccttgagggcctgacccttggagacgatcttgtctcccgattgcatatgccttcttattttttgtggtgctgagtrgcggttttsaactgctggaaaaagaaatgtgaaaacgtgcactgacccttgtcaatgctcaggaaggatgtcagaataacattaacctttcttttcaagttgagcacctgttttgtttctgttttgttttcaratcaatttctatgcaacacaaataagtactttcatgtgttcaggaatgaatagattttagtaaaataatccatggtgaagacttagaaaatgatatccatcatgcatagcactgagaatgggttgcaaggtcaggaaacctaaaccttaaattaacatctgcataaagcaagctatttaaaaaccatatattcactgatattttataaattcttggagcctgctaagagagaggttaattgtcattgtcatgtggtaccttctargtgaaagtgtttcatttctattatttctttggtagaaatgctactaaagtgagtttgcttgttttatttatagccttcttcttttagaacacactcaccacagtgaaagtccagttataatttaagacctcgctataatttcagagaatcttaatctatctgctctcctgtaaggaaattcattgatctctgcagtgagttgtataatagaaaagtgacaatgctcatagtcatcagctcactggtgactcattctgagatgctggagaaaggcctgaaggtagtamctgaggggactggctgacagattctcaatatttggaatgtggctctaccacttaacgctcttaatctgctacaccaacagtacattgtctttcttggcagcactggccagctaccctatgttgaggaggctcattctgaaccagtggctccaggagactcttctcaactcaagttctcaccagcttagtgctgtagttcacagtggtctcctttactggttgggatcccagggctgctcccatccattatgtctctttgaaaaagatgcttataaaagcctttcatttgtgactccaacaagtcacctgtatcccttgacctgtagaatagtttctggatggtacacagtcagcactaatcagaaattagaaaccgtggctctcacactacatctggcctacaaatayactttttgtttggcttttagagtgtgaaatatttttgaattagtttataagatttaaaaattagaagcttccacgttaaaactttaaagtctaaaatcattttgccttccttgaaaaataaaaattattgcaaaatcagaagttggcatggttcttacatggccaccatatttcagtggtgagtggcaattgcttcctttacacaggtcatattctctccagccttccacagatcccatacttcttaggattctacttgtgttaatattttttattcctatagacattcacatatatgtaggacttctgcctaaaactctatctatctagaggatagttcacaggctctcagcctgcagacccattcgtgcctttagagctattctcaatataataataccttatttttwaaaaaaaaaactgcttgtagttcaatggtctatttatctgtgatctatgatctatttatctatctattgcattatgtggattatgactttaatataaacctactattcctgaactacttaaattcctaaactactttttatgtatgagccaatgtaaaaagaacgcagtcagacttaggggcaaataatatatttacattaaatgaaggctaaatgccatgtaatagwctctgcatgaggcttcatagtaacttaatttgaaagagaagatggcagaaatgaatcatcacctgacattaggtttgtagcaggtcttaggagaacctgcccagaagcagtcaatgccgtgtttccttggagggcagaaatttatttccagcaaaataacattaactgccacattatattaattttgctaaytagaattatatttgtatgtagtttctatttaatgtatacatttagttgggttctacagatgtttaagaatagttacaaaaatgtataaaagaagcttataactaatttcatggtagtacaatttaagtcacataatttaagccatggttcaggaaaataaacacttttaaaaagggtttactgaattctcaaatttgaaaacctctattttgatgtcattgattaaattgccttctctttatgtagcattaggatttggtttgcttgatttgagaaggggttgcattccatgcatttgggtctctaccctgaagcccagcccaggagataggcaccagctgcagaacaggcctgagttaacaaagacagacatgagaagagtatggatgaaggccaaatcttgggagttgggaggaagccacagaagtaatgatcaaaactaggctgcagagttgaatttaggatttaggtcatatgaaaggcaatcagtgagagcagggctgtggcatcctgggcagctgtttggtactctagctggtcccacctttatgggtgtgagaagaatgccatgtcactggagtagcctggctaaaaaacaatggagatccgcagatagacacaatgatgttattagcaggctcttcagtggaaattcttctcagggactaatttaaatccccaagaattacattagtaagcatctcaagggaataccataatatcatctacataaggatattttttcatctgtctgcctccaaagcatgggtctactgagcctcatgtattacatgtgctctcatatttccttaaggaggaccttactgagctttatgattagaatgcagcacattgtcctgaggtcacttatttctctcttcacatctaattttgaaaggtcactggaccacaaaataatcctgactatctcataattgtctgagccaggcatataaggctaaatttcaattacaggcatatgccattttattgtacttcgtagcatttgttcaacagcatgtgcttgctttgtgtctctgggtcacattttggtaattttagcaatatttcaaactttttgttagtattatatctgctatggtgatctgttatcagtgatctctgatgttactgtcataattgcttggagcaccatgagctggactcatgtagtrtgggaaactgaattaataaacatgtgtgtgtttagactgatccaccaacaacaggtagttgccctctgtctcttcttctcctcaggccaccctattctgagacataacaatattgaaatgaggtcaattaataactcyacaatgtcctctaagtatactcagtggcccagttcaggtttttgactttgctgcacaaaagaatttgagagtgagtccaaagtaaaagtaagcaagagagtttattacaaagcraaagtacactctgatggctgctcaaagtgggatgctcaaaggtgagacagcaccaactgacacttgggaaactctccttatgggagtcttacatgattcttcatgaaggggtgggaagaagtgctgctattaagcatattctgggtggtctgctggcagcacatgtgctgtggctgtawatgctagtacatgtatcgcatgcctcactggcatcttaaatctccacccaggggcatcttttttactattatagtgagcataggtcagcccaaggtaactactcatgaatttctgcacttgtgtgaatctggggattttcccttctgttcttccacccccttgctaaaggatggtctaaccatgaacccaggatgtggtttgtgcactgtcaggtggtttgttctcttcatctgtttaacaagtttattcccctttaagggaggctatgaccaccctatctaaccaacctcataagtactcaagtaaaaggaagaggcacacatatctcacttaaatcacaagctggaaatgattaaacttaatgaaaaagcatgttcaaagctgagatagactgaaagctaggcctcttgtgccaagcagtcaagttgtgaatgcaaaggaaaagatcctgaagaaaattaaaggtgctaccttagtgagcacataaatgacagaaagtgaagtcattttatggctgatatggaggaagttttggtggtctggaytgaagatcaaaccagccacaaaattcccttaagccaaaacctaatctagaacaaggccttaactctcttcagttctttgaaggctgagagaagtgaggaaccttcagaagaaaagtttgaagctaacagaggttggttcatgaagttaaggaaagaaaatgtctccataacataaaagtgcaaggtgaagcagcaaatgctgacatasaagctggagcaagagatccagaagatctagctaagatcattgatgaaggtggctacactaaacaacaggtttttaatgtagatggaacarctttatattggaaaaagaggccatctaggactttcatagctagagaagagaagtcagagactggcttcaaagctttaaaggacaagctgactttcttgttgggggctaatgcagctggtgactataagttgaaaccaacactcatttaccattccccaaatccgaggacccttaagaattatgctaaatctattctccttgcatgtgctctatgaatggagcaacaaggcctgtatgacagcatatatgtttacagtatggtttgctgaatattttaagctgactgttgagacctactgcttagaaaaaaaatattcctttaagaatattattgatcattgacaatgttcctggtgacccaagagctrtgatggagatgcacaaggagatcaatgtgtttcttgtctgctaacacaacgttcattctgcagcccataaatcaaggagtaattattactttcaagtgttattatttaagaaatacatttcatraggctataggtataattcctctgaygtacctgagcaaagtaaattgaaaactttctggaaaggattaaccattctaggtgccattaagaagatttgtgattcatggcaaggagtcaaatatcaccattaataggattttggaagaagttagttccaacactcattgaaaacttcaggagtttcaagacttcaatggaggaagtaactgcagatgtggtgggaatagcaaaagaactagaattagaagtggagcctgaagttgtaactgaatttctgtaatcttatggttaaactcgaactgatgaggagttgcttcttayggatgagcaaataaaatacgtttttcctcttaaaaawttttttgggtacatagtagctatatatatttatggggtacatgagatatttgatacagacatacaatgtataataattacatcagrgtaaatggggtattcatcacctcaagcatttattctttctttgtgttagaaacaatccagtcatctttktgttatttaaaaatatacaataaattattgttgcctgtaatcacctattatgctatcaaatactagatcttattcattccacctgactatatttttgtacccattagccatccccactacccttctcagcctctggtaaccatcatcctactgtctgtctctatgagttcgattattttaaatttttagctcctaccaataattgagaacatgcaaaggttttctttatgtgcctggcttatttcacttaacataatgacctccacttccatccatgttgttgcaaatgattgatagaatctcatttttttaatggctaaatgggactctgctgtgtatatgtaccatattttctttatccatttgtctgtcaatagccacataggttgattccaaatcttggttattgagaatagtgctgcaacaaacatgggggtgcaggtatctctttgatataataatttcttttcttttgggtatatatacctagcattgggattgctggataatatggtagttctatttttaatttttgagaaaactcaaaactgttctccatagtgattgtactaatttacatgcccaccaccagtgtatgacaattcccttttctgcacaatcttgccagagtttgtttttgcctgttttttggataaaaaaccattttaactgggatgagatgatgtctcattgtagttttgatttgcattcctctgatgatcagtgatattgagcagcttttcatatacctgtttgccatttgcatgtcttctttttgggaaatatctattcaagtctcttgctcatttttaaatctgattattaaattttttcttattgtttcagctccttatatattctgactattaatcctttgtcagatgggtagcttacaaatattttctctaattctgtgggtggttctcttcacttttttgatcatttatttgctgtgcagaagctttttaacttgatgttatcccatttgtccattttcactttgtttgcctgtgcttgtggggtattactgaaggaatcttcacctagttcagtatcctggacagtttccccagtgttttctctatgagttttacagtttgatgtcttagatttaagtctttaatccattttgatttgagttttatatatggcaagagataagggtctagtttcattcttcygcatgtggatatccagtttccccagcattatttattgaagagactgtcttttccccagtgtwttgctcttggcacctttgtagaaaatgagttcactgtaggtgtgtagatttctctgtgggttctctattctgctccattagtctatgtgtccatttttatgccagtatcatgctgttttggttactataggttactatagctctgcagtataatttgaagtcaggtgatgtgattcctccagttttgctcattttgctcagaatgcttttggctattctgagtcttttgtaattctatataaatgttaagattgctttttctattgctgtgaagaatttcattggtattttgacagggattgtgttgaatctgcagattgctttgattagtatgaacattttaacaatattgatccttccaatccttgcacatggaatatctttccatttttttagtgtcctgttcaattaccttcaatgttttatagttttctttgtagaaatctttcactttggcaactttattcctaggtattttattttatttgtagttattgtaaatgggattactttcttaatttctttttcagatttttcactgttggcatatagaaatgctacagattttagtatggtgattttgtgtattgcaactttactgaatttatcagttctaatgtttatttcttgttggcgtttttagtttttttcaaacataagaacccatcatctgcaggcaagaataatttgccatcttcctttccaatttggacgtgctttatttctttctgtagtctgattgctttagctaggactttcacagcaatattgaataacagtggtaaaactgagcattgttttcttattccagatcttagagaaaaggctttcagtttttgcccattcagtgatactatgkgtctgtttcaaatggcttttattgcgtggaggtatggtctttctattctttgtattttgagtgtttttaacatgaagggatgctgaattttatcaaatgctttttcagcatcagttgaaataatcttgtggtttttatccttcactctgttcatatgacatatcacattgatttgtgtatgttgaactattcttgtattccttggataagtcacacttagtcatgatgaataatctttttaatgtattgttaaatttagtttgctagtattatgaggatttttgcataagtgttaaacaaaaatattggcctacagctttctttttttttgatgtgtctttgcctggtttggtatcaggttaatattggcctcatagaatgastttggaagtattgcctctatttttcagaatagtttgagtagttttggtattagttctcttttaaatgttcagtaaatatcagcagtgaagccttcaggtctgtggcttttctttacagggagactttgtgttacagcgccaatctcattacttgttactgatctgttcagattttggacttcttcctggttcaatcttggtaggttggttatctagcaaccatttatccatttcttctaggtttttccaatttgttggcatatagttgcttatcttaacctctaatagtcctttaaacttctgttttgtgagttgtaatgtttcctctttcatctctgattttatttggatcttctctctttttttcttagttctgtgggctaaagattaatcaattttgtttattttttttaaatcaactttttagactgatttgagtaataataaaactccagtctctcacatggctggctctgtgtgaattgctctttctgtattgcaatttccctgtcttaataagttggctttgtctaggcagtgggcaaggtgaacccatagggtggttacaaatttggggctcatccaggattgctcttgtggctacctgcttgtggttcagtagccctgcctctggtgatagatcagaggccagttgaagtatccactttgtactgttggtcttgggggctcactctgatactgtctgtactggcaaggtgctgccaacccaatgtgcatggatttaattgcaatagagaaatagacctggggagacatcccataattgtaaccctatcacaggatgtttgtctgtagcttcatggcgaggtttatgtaactgcagccctatcacattgtgtctgtctgtaggctggtcatagggtatctgtctgtartccagtcatggagtgtctgtagctgtagccccattacagggtgtctgtaatgagtatcctaggkgctgccaatgccttctttcttctcctgattggtttgggtccttaggggatcttgggttttctgtagccccatggtggggtgtctgtcttagttcagatccttcagggttttcagttggcgctccctaattagtaggaagagtcttgattcaggagacttttcctcaatcagaaagatttcagggagatttccagacaaagaacaggagaatacttagaaagggatactcttaaagttcttggttagggatcttgatttggaaggccttctgtccgtcttgtctttgtgtgtgtttgtatatgtggaggggatctcaaaaggaattgctgatggaagtccagcaggcctaactcagaaaaccctccttatttgtctgatcacattcggtgagctctaaagaaagctcagcaggcctgacgaggggagactatccactcttcgtcttgcccagagagcactcactgaattaccagttggatcaaaaccaacagggaccaatgggagaaagtttgagacttgccacatcagtactgagtgctaaacaaggtgactagtgtctgttttgttatgtgcattttgctttggctgggatggaaaatsctaattttgttccccatgcagctttgggcagtatcttgcaaaattgagaaccttttgcctatgtttccataaaacagaaaaggatgattttctttttgaaggtggcttgacctccatagctatggcacagtgagctgggtccttcaaacgctactccattttcctggaagctgcagagaaaaggagcccagaaacctggtataccagcaaaatgtgtaaaaaattcttacaagccaagttctgtgtgtgtatgtgtgtgtgtgtgtgtgtgtaggtggtaaatgtcactatttgtctcttctgcaagtatctgattaattgaaaaaaggatttgtgagactagtcttaggctgtagcaaatctggtgcactctattctatgatacccctctcccccttatagaaagaatttgtctttctgtaatggggagaggggtatcatagaatagtatgtgagtttaggatccctgtaagcctgcttttcaagccagcatgacaggctggtcagttatgaactttgctgtgggtgcctgaaaccaataccagatgaaatttctccatcttgttttgtgtccttaagagcttaaccttgtgaccatgtggggatacttgtcgtggtttcaccatccagaggacagcaatttgggggctcatgtcatagtcagccctagaaattatcttgaacaattaaaagcctttgcaagcttgaaactggctgctctagatttctgggaaaagcaatagaaacygctcaatgctgtgtagctcagtagctaagcctttatcttttggtaatggtggcccaggtttaattctcagcttctggaatgattctattctggcttattatttgtgtaactgccatttattgagcttcccacccacacccatcatggatagcttctgatttcctgtcttgaattttcctttctctgaactatgcttgaggagattccaaatctagaaagaaagaaagaaaggaaaaggaaaaggaagggaaaggggaaggaaagaaactgcttactatatctctttgagacaccatatgcatccatggttaagccataatcttagttaaaacttattaatttcatgtgggaagttacctttgatagaattcaaaaggcagaaatattgactgtcctggctagaagtctggtaataagagattttagaagattttttaaagagagctctatggttaaaatgtgcttcattaaaaatggatatccaagctatatgtatttagaaggacttaatttttttcctcctgttgaatcatgtttttctgaaaaaagtgtttcttctcagtcagctgaattgtttttctccattttatcttcttgccactgttgatgcccacatgggagaacctaagataattattaacagcctgggactcctggggaaaaacagagggggcaccacagaccccattctgggaaaaamtgttttcctcatggaaccccaggaattgaaggaaaataaatccctcaaaatctaaggctctgttctgttttgcattgcattagctgatggttttgacttttgggattatcgaaaattactttgcgttatgggagagttttcagtcttggtgtgtaataactaggtagaaaatatactttaagggatggctaatatcagttgtggaggtatatttgactcttcacatgcttggatcagagaagcatgctcttggtcacctgggtgatatgcacacatccccaccctccactgagagatgagacaccaatgggtgatgggctgattacaaaataggctgattggctttgggttgcctgtaatggaatgcatggtagaaggactgcactatcttctcccataggatttccctccttctgggggatccaggatccaggatccagtataaaatggcacccttaattctagggatctgttttacctacyttggagcattagattctagatatggcctggggacatgtggagttaaccttgccccyagctatgctgaaagcagtcagaccttatctacacttctgtctgatattctaggccccacacctggtatataattaaacttgtttacttatcagatttttcatcaaaaataaaagttgctaagagttaacattgtaacatgtaattcagactactggagaaacagttttaacatacaacgtgtgtaaaggaagcagaatgtgtttttgcaagtagactataagaaggcatgggaatgtggtttttgcctggtttagaaagttagaggattgctctgatttaaaataaagttgaaggtttaggcaaggcttgtgaagggttgatcttgcaaagcatgttctgtgggtatgagcaagttggataagatttgaaggggattatttcatttttttttcatagtcattgaacattaaaatgaaaacacactgatgcagggtgagaatctgagcccatgtacctgaataacagggttttcttagaaaattgatctgyttaatggaaaattgtatagggttctaaaagatttatgaaaatcttacatatggtcaaatgaattaaaattggatagatttatacaattttattaaaaactagcattattattaaagatgcactaatgcaaacatgaaatttggttttccctcttgaaaactatttttatgtactattgagaaaaaatgaaagatttttgtttgtttttaaagtaaactccacaaaaattggggggaagggaacgagaagagacagattcagttggcctcatgctatctacattgggtcttgtttggaaagctgtctcctctatcagagtaaaggtttttcttttctatcattttggagttctcattttgttcagatgaatgacttatgatgacctgggattctattttgtggtatccagtgttttaaacctttgatatctgacaaacttccccaaatcaaattataaattgtgtttctgaagaggggccaagatggccaaatagaaacagctcttgtctgcagctcccaytgagaccaatgcagaaggtgggygatttctgcatttccaactgaggtaccaagtttatctcactggtactggttaggcagtgggtacaacccacggagtgtgagcagaagcagggtggggtgtcacttcacctgggaagtccaaggagctccctcccccagccaagggaagccatgaaggactgtgcaactaaggccagatgctacgcttttcccatggtttttgtctggagatcaggactggggttccaggtgccactgggtacaaaaaatacctttgcagctagcttggtgcctgcccaaacagccacccagttttgtgcttgaaacccaggtgcctggtggtgatcctacacctggraccccagcaagacagaactgttcactgccttggaaagggagctgaagccagggrgtcaagtggtctcattcagtgggtcctgctcccatggagcccagcaagctaagaaccactggcttgaaattctcactgccagcagaagtctggagtccacctgggatgattgagcttggtgtggggatgggcatccaccattactgaggctttagtaggctgttttcccctgacagtgctaaggagactgagaggtctgaagtgggcagaatttgtgtggcaaagccgctgtgaccagactgcttctctagattcctcctcactgcgcaggggatctctgaaggaaatgcagcagccccagtcaggggcctacagataaagctctcatcttcctgggacagggaacctgggacagaaagggacagctgtgggcacagcttcctcagacttaatttttcttgcctggtagctctgaagagagcagctgatcctgacaaggaggattctcgcagcacagcacaccagctttgctaagggacagactgcctcctcaatgggtccctgacacctgtgcctcttgactgggagaggcctcccaacaggagttgccagacacctcatacaggagagctctggctgccgtcaggctggtgcccctctggcacaaagctctcagaggaaggatcaggtagcaatctttgctgttctgcaccctccactggtattacccaggtgaacagtgtctggaatggaccttcagcgaactgcagctgacctgaagaaaaggggcctgactgttcgaaaaaaactaacaaacagaaagcaacaacaatatcaacagaaaagacctcccccsctcccaacacacacaaactccatccaaagtttatcagcctcaaagatcaaaggtggataaatccatgaagatgaggaaaaaccagtgcaaaaacactgaaaattccaaaaaccagaatgcctcttcttcttcaaatgattgtaactcctctccagcaagggcacaaaactggatggagaatgagattgatgaattgacagaagtaggcttcagaaggtgggtaataacaaattcttctgagctaaaggagcatgttytaacccaatgcaagcaggctaagaatcttgataaaaggttacaggaaatgctaactagaatacacagtttagagaacaacataaatgacctgatggagctgaaaaacacagaataagaacttcgtaaagcatacacaagtatcaatagcttaattgatcaagcagaagaaagaatatcagaaattgatgatcactttgctgaaataaagtgtgaagacaagattggagaaaaaaggaaaaaaaaaatgaacaaagcctccaagaaatatgggactatgtgaaaagactaaacctatgatggattggtatgcctgaaaatgacggggagaatggaatcaacttgaaaaacatacttcaggatattatccaggagaacttccccaacctagcaagacaggccaaaattcaaattcagaaaatacagagaacaccactaagatagtcctcgaagagatcaagcccaagacacatagtcaccaggttctgaaagggtgaaacaaacgaaaaactgttaagggcagccagagagaaagatcaggtcacctgcaaaggaagcccatcacactaacagtgaatctctctgcagaaaacccacaagcaagaagagagtgggggctaatattcaacattcttaaagaaaacaattttcaacccagaatttcatatccagccaaactaagcttcataagtgaaggagaagtaaaacactttacaaacaagcaaatgctgagggattttgtcaccaccagccctgcttacaagagctcctgaagaaaacactaaatatggaaaggaaaaactggcaccagccactgcaaaaacatcccaaaatataaagaccaatgacaccataaagaaactgcatcaactaatgtgcaaaataaccagctggcatcatgatgaaaggatcaaattcatacataacaatgttaaccttaaatgcaaatgggctaaatacctcaattaaaagacacatgctgttaaattggataaagtgtcaagacccatcacggtgctgtattcaagagacccatctcacatgcaaagacatacataggctcaaaataaagggatggatgaatatttaccaagcaaatgaaaagagaaaaaaagcaggggttgcaatcctagtctctgataaaacaggctttaaaccaacaaagatcaaaaaataaaaaaagcattacataatagtaaagggatcaatgcaacaagagctaactatcctaaataatatgcacccaatacagaagcacctagattcacaaagttcttagagacctacagagagacttagattctcacataataatagtgggaaactttaacaccccactgacaatattaggaagatcgacaaaacagaaaattagcaagcatattcaggacttgaaatcaactctggatcaagtggacctaacagacacctacagaattctccaccccaaatcaacagaatatacattcttctcagtgccatatggcaggtattctaatatctactacataattggaaataaaacattcctcagcaaatgcaaaagaatrgaaatcataactaacagtccctcagaccacagtgcaatcaaattagaactcagggttaagaaactcactcaaaactgcacaactacatggaaattcaaagatatttccactgagtgataaataataaaattaaggcagaaatcaagaagtgataacaggaaaatttatagcactaaatgcccacatcagaagctagaaagatctcagttgacaccctaatatcacgattaaaataactagacaagcaggagcaaacacattcaaaagccagcagaatacaagaagtaacagatcagagcagaaatgaaggagatagagacacaaaaaacgcttcaaaaaatcagtgaatccaggaggcggttttttgaaaatattaacaaaatacatagaccactatctaaactaataaagaagaaaagagaagaatcgaatagagacaataaaaatgataaaggggatatcaccattgatcccatagaaatacaaactaccatcagaaaatacgataaacagccctatgtaaccaaactaaaaaatctggaagaaatggataaattcctggacacatacaccctcccaggactaaaccaggaagaagatgagtgcctgaatagaccaataacaagttctgaaattcaggcagtaattgatagcctgctaactaaaaagagcctagaatgagacagattcacagccgaattctaccggaggtacaaagaggagctggtaccattccttctgaaactattccaaacaaaagaaaaagagggactcctcactaactcatttcatgaggccagcatcatcttgataccaaaacatggtggagacagaacaagaaaagaaaattttaggccaacatccctgatgaaaatcgatgtgaaaatcctcaataaaatactgacaaaccaaatccagcagcacatcacaaagcttatccaccacgatcaagtcagcttcatccctggggtgcaaggctggttcaacatacacaaattaataaatataatttatcatataaacagaaaaaagggcaaaaaccgcttgattattttaatagatgcagaaaaggcgtgagataaaattcaacatccctttatgttaaaaaccctcggccgggcgtggtggctcagcctgtaatcccagcactttggggggctgaggagggcagatcacgaggtcaggagatcgcgaccatcctggctaacacggtgaaacgccgtctctactaaaaaaatacaaaaaaattagctgggcgtggtggtgggtgcctgtagtcccagctactcaggaggctgaggcaggataatggcgtgaacccaggaagcggagcttgcagtgagcggagatcgagccattgcgctccagcctgggcgactgagcgagactctgtctcaaaaaaaaaaaaaagaaaaaaaagaaaaaaaaaaaaccctcaataaactaggtattgaaggaacatacctcaaaataagagccatttattacaaacccagaacaaatatcatacagaatgggaaaaagctggaagcattccccttgaaaactggcacaagacaagaatgctctctctcagcactcctattcaacataatattgaaagttctagccagggcaatcagacaagagaaagaaataaatggtattcaaatagaaagmgagaaagttaaattatctctgtttgcagctgacrtaattccatatctagaaaaccccatcatctcagcccaaaagcttcttaacctgataagcaacattagcaaagtttcaggatgcaaaatcaatgtgtaaaaatcacaagtattcctatacaccaataatagacagagagccaaatcatgagtgaactcccatttacaattagtataaagagaataaaataccaaggaatacaacttataagggatgtgaaggacctcttcaaggagaactacaaatcactgctcaaagaaatgagagaggacacaaatcaatgggaaaaaatttcatgctcattgatagaaagaatcaatattgtgaaaatagccatactgcccaaagtaatttacagattcaatgctattcccataaagttaccattgactttcttcacagaattagaaaaaactactttaaatttcatatggtaccaaaaaagagcccatataaccaagacaatgttaagcaaaaagaacaaaactggaggcatcatactacctgacttcaaactatactacaagtctacagtaaccaaaacagcagggtactgataccaaaacagatatatagaccaatggaacagaacagagacctcagaaataacaccatacatctacaaccacaagatcttcaacaaaaatgacaaaaacaagcaatgaggaaattattccatatttaataaatcatgctgggggaactggctagccatacgcagaaaacagaaactgaactccctccttacaccttatacaaaaattaattcatgttggattaaagacttaaatgtgaaacccaaaaccataaaaaaccctagaagaaaacctaggcaataccattcaggatataggcacgatctcatagtcataagatttcatgaataaaacacaaaaagcaactgcaacagaagctaaaattgacaaatgggatctaattaagctaaagagcttctgcacagcgaaagaaactatcatcagagtgaacagacaacccacagaatgggagaaaatttttgcaatccatccatctgacaaaggtctaatatccagaatctacaaggaacttaaacaaatttacaagaaaaaaacaaccccatcaaaaagtgggcaaaggatatgaacagacacttccgaaaagaagacatttatgtgggcaacaaaatatggaaaaaagctcatcatcgctggtcattagagaaacgcaaatcaaaaccacaatgaggtaccatctcatgccagttagaatggtgattattaaatgtcaagaaacaacagatgcyggagaggatgtggagaaataggaaygcttttacattgttggtgggagtgtaattagttcaactattgtggaagacagtatggtgattcctcaaggatctagaaccagaaataccatttgatccatcagttctgttactgggtatatacccataggattataaatcattctactataaagacacacgcacatgtatgtttattgcagcactatttacaatagcaatgacttggaaccaacccaaatgcccatcagtggcagactggataaagaaaatgtggcacatatacaccatgaaatattatacagccacaaaaaagaatgagttcatgtccttccagggacatggatgaagctggaagcyatcattcttagctaactatcacaagagcagaaaaccaaacaccgcatgttctcaaaagtgggagttgaacaatgaaaacgcatggacatagggagggggacattacacaccagggcctgtcatggggtggggggcaaagggacagagaggaataggacaaatacctaatgcatgcagggcttaaaacctagatgasagattgatgggtgtagcaaacaaccatggcatatgtatacctctgtaacaaacctgcacattctgcacatgtatcccaacacttaaagtaaaataaaaataaataattttttttattacccaatcttttagatagtaggtcctctaaagtccaaaaatgacatttggcttatttagtataaaaattttacagaatgcattgccaaatatgaaatggtgtttggctttctttggattatatttgtgtaaatgtattrctggtatatgttacaaaattatgggaatctcctataattctaatatgacttagtgtatgttaacagtaataattgtaattgatatgttaaattattgtgtgctacagaggtaattaatttccttgtcaattgtgtctttatctgtgattgccctaaggcttcttttcatccatagacaattgtcgtcttgttttgatcctcttttaatgatgattttattatcagctatgaaactctaacactctaacaggtactctttttttttaaatttattattattatactttaagttttagagtacatgtgcacaatgtgcaggtaagttacgtatgtatacatgtgccatgctggtgcgctgcacccactgactcgtcatctcgcattaggtatatctcccaatgccatccctcccccctccccccaccccaccacagtccccagagtgtgatgttccctttcctgggtccatgtgttctcattgttcagttcccacgtatgagtgagaatatgcggkgtttggttttttgttcttgcgatagtttactgagagtgatgatttccaatttcatccatgtccctacaaaggacatgaactcatcattttttatggctgcatagtattccatggtgtatatgtgccacattttcttaatccagtctatcattattggacatttgggttggttccaagtctttgctattgtgaataatgccgcaataaacatacgtgtgcctgtgtctttatagcagcatgatttatagtcctttggdtatatacccagtaaagggatggctgggtcaaatggtatttctagttctagatccctgaggaatcactacactgacttccacaatggttgaactagtttacagttccaccaacagtgtaaaagtgttcctatttctccacatcctctccagcacctgtcgtttcctgactttttaatgattgccattctaactggtgtgagatggtatctcattgtggttttgatttgcatttctctgatgaccagtgatggtgagcattttttcatgtggtttttggctgcatgcatgtcttcttttgagaagtgtctgttcatgtccttcgcccactttttgatggggttgtttgtttttttcttgtaaatttgtttgagttcattgtagattctggatattagccctttgtcagatgagtaggttgtgaaaattttctcccattttgtaggttgcctgttcactctgatggtagtttcttttgctgtgcagaagctcttbagtttaattagatcccatttgtcaattttggcttttgttgccattgcttttggtgttttggacatgaagtccttgcccatgcctatgtcctgaatggtawtgcctaggttttcttctagggtttttacggttttaggtctaacctgtaagtctttaatccatcttgaattaatttttgtataatgtgtaaggaagggatccagtttcagctttctccatatggctagccagttttctcagcaccatttactaaatagggaatcctttccccacttctggtttttgtcaggtttgtcaaagatctgatagttgtagatatgtggcattatttctgagggctctgttctgttacattggtctgtatctgctttggtaccagcaccacgctgttttggttactgtagccttgtagtatagtttgaagtcaggtagcgtgatgcctccagctttgttcttttggcttaggattgacttggcgatgcaggctcttttttggttccatatgaactttaaagtagttttttccaattctgtgaagaaagtcattggtagcttgatggtgatggcattgaatctgtaaattaccttgggcagtatggccattttcatgatattgattcttcctacccatgagcatgggatattcttccatttgtttgtatcctcttatttccttgagcagtggtttgtagttctccttgaagaggtccttcacatcccttgtaagttggattcctaggtattttattctctttgaagcaattgtgaatgggagttcactcatgatttggctctctgtttgtctgttgttggtgtattagaatgcttgtgatttttgtacattgattttgtatcctgagactttgctgaagttgcttatcagcttaaggagattttgggctgagacaatggggttttctagatatacaatcatgtcatctgcaaacagggacaatttgacttcctcttttcctaattgaataccctttatttccttctgctgcctaattgccctggccagaacttccaacactatgttgaataggagtggtgagagagggcatccctgtcttgtgccagttttcaaagggaatgcttccagtttttgcccattcagtatgatattggctgtgggtctgtcatagatagctcttattattttgaaatacatcccatcaatacctaatttagtgagagtttttagcatgaagggttgttgaattttgtcaaaggccttttctgcatctattgagataatcatgtggtttttgtctttggttctgtttatatgctggattacatttattgatttgygtatattgaatcagccttgcatcccagggatgaagcccacttgatcatggtggataagtttttgatgtgctgctggattcggtttgccagtattttattgaggatttttgcatcaatgttcatcaaggatattggtctaaaattgtcttttttggttgtgtctctgcccggctttagtatcaggatgatgctggcctcataaaatgagttaggacagattccctctttttctattgattggaataatttcagaaggaatggtaccagttcctccttgtacctctggtagaattcggctgtgaatccatctggtcctggactctttttggttggtaagctattgattattgccacaatttcagatcctgttattggtctattcagagrttcaccttcttcctggtttagtcttgggagggtgtatgtgtcaaggaatttatccatttcttctagattttctagtttatttgcrtagaggtatttgtagtattctctgatggtagtttgtatttctgtgggatcrgtggtgatatcccctttrtcattttttattgcatctgtttgattcttctctctttttttctttattagtctggctaacagtctgtcaattttgtagatcctttcaaaaaaccagctcctggattcattaattttttgaagggttttttgtgtctctatttccttcagttctgctctgattttagttatttcttgccttctgctagcttttgaatatgtttgcccttgcttttctagttcttttaattgtgatgttagggggtcaattttggatctttcctgctttctcttgtgggcatttagtgctataaatttccctccacacactgctttggatgtgtcccagagattctggtatgttgtgtctttgttctcgttggtttcaaagaacatctttatttctgccttcatttcgttatgtacccagtaatcattcaggagcaggttgttcagtttccatgtagttgagtggttttgagtgagattcttaatcctgagttctagtttgattacactgtggtctgagagacagtttgttataatttctgttcttttacatttgctgaggagagctttacttccaagtatgcggtcaattttggaataggtgtggtgtggtactgaaaaaaatgtatattctgttgattttgggtggagagttctgtagatgtctattaggtccgcttrgtgcagagctgagttcaattcctgggtatccttgttaactttctgtctcgttgatctgtctaatgttgacagcggggtgtgaaagtctcccattattaatgtgtgggaggctaagtctctttgtaggtcactcaggacttgctttatgaatctgggtgctcctgtattgggtgcatatatatttaggatagttagctcttcttgttgaattgatccctttaccattatgtaatggccttctttgtctcttttgatctttgttggtttaaagtctgttttatcagagactaggattgcaacccctgcctttttttgttttccatttgcttggtagatcttcctccatccttttattttgagcctatgtgtgtctctgcacgtgagatgggtttcctgaatacagcacactgatggatcttgactctttatccaatttgccagtttgtgtcttttaattggagcatttagtccatttacatttaaagttaatattgttatttgtgaatttgatcctgtcattatgatgttagctggttattttgctcgttagttgatgcagtttcttcctagtctcaatcattacgttttggcatgattttgcagcggctggtaccvgttgttcctttccatgtttagcacttccttcaggagctcttttagggcaggcctggtggtgacaaaatctctcagcatttgcttgtctgtgaagtattttatttgtccttcacttatgaagcttagtttggctggatatgaaattctgggttgaaaattcttttctttaagaatgtkgaatattggcccccactctcttctggctggtagagtttctgctgagagatcagctgttagtctgatgggcttccctttgwgggtaacttcacctttctctctggctgtccttaacattttttccttcatttcaactttggtgaatctgacaattatgtgtcttggagttgctcttctcgaggaatatctttgtggcgttctctgtatttcctgaatctgaatgttggcctgccttgctagattggggaagttctcctgcataatatcctgcagagtgttttccaacttggttccattctccccatcactttcaggtacaccaatcagacgtagatttggtcttttcacatagtcccatatttcttggaggctttgctcgtttctttttattcttttttctctaaacttcccttctcgcttcatttcattcatttcatcttccatcgctgataccctttcttccagttgatcgcatcagctcctgaggcttctgcattcttcacgtagttctcgagccttggttttcagctccatcagctcttttaagcacttctctgtatcggttagtctagttatacattcgtctaaatttttttcaaagttttcaacttctttgcctttggtttgaatgtcctcccgtagctcggagtaatttgatcatctgaagccttcttctctcagctcctcaacgtcattctccgtccagctttgttccrttgctggtgaggaactgcgttcctttggaggaggagaggcgctctgctttttagagtttccagtttttctgctctgttttttccccaactttgtggttttatctactttyggtctttgaggatggtgatgtacagatgggatttttgtgtggatgtcctgtttgttagttttccttctaacagacatgcaggtctgttggagtaccaggccgtgtgaggtgtcagtctgcccctgctggggggtgcctcccagttaggctgctcgggggtcaagggtcagggacccccttgaggaggcagtctgcctgttctcagatctccagctgtgtgctgggagaaccactgctctcttcaaagctgtcagacagggacatttaagtctgcagaggttactgttgtctttttgtttgtctgtgccctgcccgcagaggtggagcctgcagaggcaggcaggcctccttgagctgtggtgggctccacccagttcgagcttcccggctactttgtttacctaatcaagtctgggcaatggcgggcgcccctccgccagcctcgctgccgccttgcaatttgatctcagactgctgtgctagcaatcagtgagactccctgggcgtaggaccctccgagccaggtgccggatataatcttgtggtgcgccgttttttaagcccgtcggaaaagcgcagtattcgggtgggagtgacctgattttccaggtgccgtctgtcacccctttatttgactaggaaagggaactccctgaccccytgcrcttcccaagtgaggcaatgcctcgccctgcttcggctcgtgcacggtgcgcgcacccactgacctgcgcccactgtctggcactccctagtgagatgaacccggtacctcagatggaaatgcagaaatcacccrtcttctgcgtggctcacactgggagctgtagacctgagctgttcctattcagccatcttggctcctctctaacaggtactcttaaatgcaggtttctgaytgataattctggagattgtgacattagaatagagaaacattttcaaatagaagactgaaataatcttttctgacttttcccttaaaagtttgctgatccttttttgtttatcagagccaagaaatcttttttgagctattggcagcttttaacaattgagtaaagtatactgctatgaataaaatttgaagcatattgttttcctttgacctgctttctctagaacttggaaactatttgtgagtattcttaacttatggcaatatagttatttgtacaagtgctataaaatgttttcttttgcaataggacacaattggaggaactggttatttaaccaaggctttgactggaatggtgtgctttctttaatgaatcaaacttgacttatacagccaataaaagacccttgggaaaactggtctcataccattccctgtacaaggttcctgacctgtggtaagtaaagaatgtcactttctaacaggcccaggagccccaaattatcttgggacctgaagaagagaggaatttacccaactcataggtatttgagggtacaaacctatggctggactcagctttaaaaaaagtcgtagagattccttatggaacagagtttcatcaaagccaatttggaaagcctatgtaaaaaataattattcttattgggctttatgcaaataatcagacaaaatatagtaatactaaagtttgttttgcagacaaatcagtcctatcatgatttacttttaaatcgagctcagtggcttccccccacccaccaagttgtccttaaaaactctgatccacaaattatctggagactgatttgagtaatagtaaagctctggtctcccaaaaacaaaacaaaacaaaacaaaacaaaacaaaacaaaacaaaacaacttttcattttgttgatctcttgtattttttagttttaatattatttatttcagcttttatctttattatagtctttcttctacaagttttgcatttggtttgctcttccttttgtagttctttaatatgcatcattaggttgtttattcgaagtttttctattgttttgatgtaggtgcttattgctataaactttcctcttggaactgctttcagtgcatctcataggatttaatatgttttttttccattttttcatttatttcaagacattttaaacattttctttgtaatttcttcattgacccactggtcattcaggagcatattgtttaatttccttgtgtttgtatagtttccatatttcgtcttgttatcaattaccggttttattcctttcttgtcagagaagatacttgatataatttcattttttaagacttgttttgttgcctaacatatggtctatccttgagaataatgcatgtgctgaggagaagaatgtttattctatagccattagatgaaatgttctgtaaatattgattaggtccgtttggtctacagtgctgatatgtctgatgtttctttgtcggttctctttctggatgatctgtccaatgctgacaatggagtattgaattttccagctattattgtattagctctcatatttgctttatatatctgaggctccagtgttgggtgtatgtatatttaaaattgttatgtcctcttgctgaattgacccccttatcattgtataatgactttctttgcctctgtatagcctttgtcttgaaatctatcttgtctgaaataagtatagcttctctggctcctttttgttttccattgtcataaaatatctctttccrttcttttattttcattttatgtgtytctttataggtgtagtatgtttcttataagaacagatcattaggtcttgtattttttttttaatccattctgccactctgtcttttgattgaaaagtttggtcaattttcattcaatgttattataaataagtaaagacttgtacttgctgatatggtttggctgtgtccccaccgaaatctcattttaaatagtagctcccataatccccatatgtcatgggagagacctagtgggaggtaactgaatcatgggggtgggttttctgtgatattctcatgatagtgaataaatcttatgagatctattggttttataaaatgcagttcccctgcacacggtctcttccctgctgccatgtaagacttgcctttgttcttccttcaccttctgccatgatagtgaggcctccccagccatgtggaagtgtgagtccattaaacctctttttccttataaattacccagtcttggatatttcttcatagcagtatgaaaattatctaacatacttgccacgttgttatttttttaaattattttggttatttcttggtcttctccttcttctttctttccttcctgtcttcctcttagtgaaggtgaatttctcagatggcatgctttaaattcttgatttttatgttttgtgtatctgttgtgtgttttttttaatttgagtttaccctgaggcttgcaaataacatattccttcattttaaaccaataacaacttaacactatttgcataagcaaacaagcaataataaaactaatacaactctaagtttagctttttccctccactttttaactttttgtcacttctatttatatcctattatatggtctatgtcttgaaaagttactgtagtattttagatatgttcatattttagtctttctacttaagatatgagtagtttacacarcacagttattgggttataaaattctgcatacgtaccattaccagtgaattttataccttcacatgatttcttattgctcattaatatccyttttcttgcagattgaagaacttcctttagcatttcttgtaggacaggtccagtgttgataaaatccctcagttttgtatgattgggaaagtctttatttctcctttatgtttgaagaatatgttcactggatatactattctaggataaattttcttttccttcagtgcattaaatatgtcatgtcatgctctcctggcctgtaaggttttcactgagcaatctgctgcctaacatattggaactcctttgtgtgttatttgtttgtttttctcttgcttttagtatcattttttatcctcgacctttgggagtttgatgtttaagtgtcttgaggtagtcttctttgggttgaatrtgcttggtgttctataaccttctacttgaatattgatatctgtctctagatttgagaagttttctgttattatctatttaaataatctttctaccctgaactttctctctacctcctcttcaagaccagtagctcttggatttgcccttttgaggctattttctaaatcttgtaggtgagcttcattcttttttattcttttttctttttgtctcccctagctatgtattttcaaatagcctgtctacaagctcactaattctttttctscttgattagttctgatgttaagagactctgatgcattcttcagtatatcagtgcatttttcaaattcagaatttctgcttcattctttttcattatttttatttctttgtgaaatttatctgatagtattctgaattcatcccctgtgttatcttgtattttattgagcttcccccaaagagctattttgaattctttatctgaaaggtaatatatctctgtctctttgagattggacattggtatattatttaattcattgggtgagattgtgctttcctgtattttcttgatgcttatggatgtttggcagtgtctgagcattaaagaattaggtatttattgtagtattctcagtctggacttgttcttacctatccttttcgaggacattccaggtatttggagggacttgggtattgagatctaaatcttggtcattgcagccatatttgcttaaccctgttgctcttgcagacttgtagagtaccaagggtaagatccaggagaactccctggattaccaggtagagactcttgttttcttcccttactttccctcaaacaaatggagcctcttactctgttctgaaatgcctggatctgggggagaggtgacataagcaaacctgtggccaccactacttggactatgctgggtcaaatctgaagccagcgtaccactgggttttgcccaagaactccagtgaccattgcctggctactacctatgttcactcaaggcccaagggctctacaatcagtaggcaggcaatctacccaggcttgtgadctggcccccaagccatgagacaaagtccttcccactcttgcctcccttttcctcaagcagaggagtctcttcccatggccaccaccaccccaggttcacagcaactattgcctggctaccaccaatgtttgctcaatgaccaagggctctgcagtcatcttgtggtgaatgacacaaaccctgagtctcttacatcaggggacttggctcccctttggcttagggactgtacaaaaatgccacccaagagtcaaggcctagaattggaaaccccaggagcttgcttggtcctctactctactatggccaagctggtatctaagatgcaagaccgagtcccctttactgttctctcttctttcctcaagcataaggggtctttccttatagccaccacagttgataatgtgctggatcatacctgaagccagcagaactctcagtctcactcagggcccacagtgtgtactgcctggctacctttgctgattgttcagggacaaaggcaggtgctaaattcatcggcagttgatgaattcttccagaactcagtctttccattcaatatagcaggtttccttctgactgtgtttaaaactgtcctctgggactacaaagaggaggtggtaccatttcttctgaagctattcctaacaactcaaaaggagggattcctccctaactcattttatgaggccagcatcatcctgataccaaaaacctggcagaaatacaacaaaaaaggaaaactttaggccagtatccgtgattaacatcaatccaaaaatcctcaataaaatactggcaaactgaatctagcagtacatcaaaaagcttatccaccatgaccaccaagttggcttcatccctggaatgcaaagctagttcaacatatccaaattaataaacataatttatcacacaaacagaaataaaggcaaaaaccacatgattattttaatagatgcagaaaaggccagagataaagttcaacatcctttatgttaaaaactctcaataaactaggtattaaaagaacatacctcaaaataataagagccatttattacaaacccagaacaaatatcatacagaatgggaaaaaggtggaagcattccacttgaaaactggcacaagacaagaatgctstctctcaccactcctattcaacatagtattggaagttctggccagggcaatcagacaagagaaagaaataaatggtactcaaataggaagagagaaagttaaattgtctctgtatagatataatcctatatctagaaaactccatcatctcaaccccaaatcttcttaacctgataagcaacattagcaaagtctcagggtacaaaatcaatgtgcaaaagtcacaagcattcctataccccaaaaacagacaagcagagaggcaaattatgaatgacctcccattcacaattgctaggaaaagaataaaatacctaggaatacagctaacaagggaagtgaaggacctcttcaaggagaactacaaaccctgctcaaggaaatcagagaaaacacaaacaaatggaaaaagtttccatgcttatggataggaagaatcaatataataaaaatggccatactgcccaaagtaatttatagattcagtgcaattcctgttaaactaccattgacattcttcacagaattagaaaaaaatctattttaaaatgcctatgaaaccaaaaaattacccatattgctaagagaatcaatagcaaaaagaacaaagctagaggcatcatgctacctgacttgaaactatactacaaggttacataaccaaagcagcatggtactggtacacatacagacacatagacaaatggaacagaatacagaactcagaaataaggccacacatctacaataatctgctctttgatgagcctgacaaaaacaagcaatggggaaataattccccatttcataaatggtactgagagaactggctagccataggcagaaaattaaaactggaccccttccttacaccttatacaaaaattaattcaagatggattaaaggcttaaaggtaaaagcaaaaactataaaaatcctagaagaaaatctaggcaataccatttaggatgtaggcacaatcaaagatttcatgatgaaaatgccaaatgcaattgcaagaaaagcaaaaattggcagatgagatctaattaaacttaagagcttctgcacagaaaacaaagctatcatcatagtgaacagacaacccacagaatgggagaaaatttttgcaatctatccatctgacaaaggtytaatatccagagtctacaaggaacttaaatttacaagagaaaatcaaccccattaaaaagtgggcataggaaatgagcagacccttctgaaaagaagacatacaagtggacaacaaacatatgaaaagctcaacatcactaattgttagagaaatgtagatcaaaaccataatgagatactaccttatgccagtttgaatggcgactattaaaaagtcaagaagcaatagatgctagcgaggctgtggagaaataggaatgcttttacactgttggtgggaatgtaaattagttcaaccattgtagaagacagtgtggcaattcctcaaagacctagagacagaaatatcatttgacccagcaatcccattactgggtatatacccaaaggaatakaaatcattctgttataaagatacatgcacttgtatgctcattgtaacactattcacaatagcaaagacatggaatcaaccaaaatgcccatcaatgatagactggataaaagaaatgtggtacatatgaatcatggaatactattcagccataaaaagaaatgacattaggttttttgaaggaacatgaatgaagctggaagccattatcctcagcagactaatgcaggagctaatgcaggaaccaaaaaccaaacactgcttgtactcacttataagtggtagctgaacagtgagaacacatggacacagrgaggggaacaatacacagtggggcctgttgtggggaggcagagcatcaggaaaaacagctaatgcatgctgggcttaatacctaggtgatgggttgataggagcagcaaaccaccatggcacatgtttacctatgtaacaaacctgcacattctgcacatataccccagaacttaaaaaataaattaaaaatgttctcttggagctagggcccaggatggggttgtcaggattctgccttttgccttattttactgtggctgagctgrtatccaagttggaagacaaagtcattttttactgtcccttctcttcttctgaaacagaggaaaggagtccctcccagagctgcaagctgtgctgtttgaggttggggaaggggtgatgcaagcactcccttggcaaccccagctgatgtctcactaggtcatatttcccccaygtccatgggctctgagcccagcacagatcaggacttccccagaagttgcagtttttgtggcctagacagcctttcatgtttatttaggaccctggagcctttatctcatggtcgtgtggcttgcaggaactcaggtctgatggctggaatggacaatttgcctctgactagggatgacctaaatgttctctccatgggaaccagctgagttctgcctgtgttgctttctactgtgacagggcagcactgagttccaatgcaaagttccacaaccactgcattctctctcctctaagtgcatagattctctctttgtgccacaagactgctgcagaaggatgggggagtggttgtataggtgattcaagactgtcctttgtaccctctttagtgtctatttctttaatatgttaaaaccaggtattgtgatctctaatctgatttttgattgtgatgaatgtgcttttttgtgtgtagataaatgttcattttggtgttcctgtgcagaagattattactagaggcttctattcagctattttgctctacctcctcttccagaacaaggtttcttgagatggaatctrtttctgatgaagatgctatgagtattgttgaaatgacaacaaaggatctagaatattacataaacttagttgataaaatggcagcaatatttgagaggagtgacttcaattttgaaagaagatctagtgtgggtaaaatgctactaaaaagcatcacataccctcagatggtcgttaacaattttttttcaataaagtattcttgaagatatgtacttattttagacacaacactattgcacacttaataaactgtagtgtaaatgtagcttttatattcagtgggaaaccaaaaaatttgtgtgacttgttccattgtatattcactttatggttgtagtccgttaccaagcccacaatatttccaaggtatgtttgtatataaaatagtgaaatacatggctttgacatgattgcctaatacctattggataacaaaggaacataaatactttagtaagatgtatctgaaattctcaactggaatatttattcgtagtatttgacaacgttagagaaaacgtgcttccctattgtatcaactacgttatttcattgaaccttacaactctaaatgtaaattcgtgttggagtgaaagggtttttgtattagttcattttcacactgctataaggatactgcctgagactgggtaatttaaaaagaaaaaaaggtttaattgactcacagttttacatggctgaagaggcctcagaaaacttacaatcacagtggaaggcagaggagaagcaagtaccttcttcacaaggtggcaggagagagagagagagctcgagtgcagggggaaaagtgccaattttaagccatcagatctcatgagaactcactcactatcatgagaacarcatggggaaaactgcccccatgatccaatcacattgaactaggtccctcccttgacacgtggggattatggggattacaatttgagatgagatttgggtggggacacagagccaaagcatatcattcactggtggtccctcccaaatctcacatcatttttatgtttcaaaaccaattatgccttcccaacagtcccccacgtcttaactcattccagcattaccccaaaagtycaagtccaaagtctcatctaagacaaggcaagtccctctgcctataagcctgtaaaatcacatgcaagtcagttacttccaagatacaatgggagtgtgggcattgggtaagtgttcccattccaaatgggagaaattggccaaaacaaaggggcyacaggccccatgcaagtttgaaacccagtggggcagtcattaaatattaaatcttcaaaatctgctttgactctgtgtgtcacatccagattgcactggtttaagaggtgggctcccttgaccttggggagctttgcacctgtggctctgtaaggtacagcccctgaagctgctttcacaggctggtgggtgttgactgactgtggcttttccaggggactctggaaaagagcagggactctgtgkgggggctccaccccacattttctctctgcattgccctagtagaggttttctataagggcttgacccctgcagcagacttctgcctggacatacaggtgtttccatacatcctctgaaatctaggkggaggtttccaaagctcaactcttgtcttctgtgtacctgcaggcccaacaccacctggaagccaccaaggattggggcttgcaccctctaaagcaatagcccaagctgtatcttggccccttttagccatggctagagctggagtggcaggaacccaaggcaccaagtcctgaggctgcacagagcagtggggccatgctccagatacattcaacaatttttccctcctaggtctctggacttgtgatgggagaggatactgtgaagatctctgatatgccctggaggcattttccccattgccttggctattaacattcaactccttattacttgtgaaatttctgcagcaggcttgaatttctcctcagaaaatgggtttttcttttgtattgcatcatcaggctgcaaattttccaagcttttagacttgcctctttttaaaacaagagttccaacttcagataacctctcaskagaacagcatgtgggaaaacaccccaatgatttaattatctccacctggtcccatccttgacatgtggggattattacaattcaaggtgagatttgggtagggacacagagccaaaccatccactgctggcccttcccaaacctcttgttctcacatcaaaacataatcattcccttccaacagtccccaaaagtcttaactcattccagcattacccaaaaatccaagtccaaagtgtcatctgagacaaagcaagttccttttrsttataagccagtaaaatcaaaagcaaattagttacttcctagatacaatggtggggggtggcacaggcattgagtaaatacacctcttccaaatgggagatattggccaaatcaaaggggctacaggcctcatgcatgtcagatatccattaaggcagtcattaaaccttaaaattccaaaatgatcacctgtgactccatgtctcacatccaggccacactgatgcaacaggtgagctcccatggccttggaaagctctgcccctgtggctttgcagggtacagcccccttcctgactgctttcatgtggggctggcattgagtgcctgaggcctttccaggcacatgatgcaagctgtcagtggatctactatgctggggtctggaggaaagtggccctctttttacagttccactagaaaatgacccagtggggacctgtatggtggctccaacctcacatttcatttctgcattgccctggtacaggttctctatgagggctccacctctgcagcagacttctgcctgcatgttcaggtgtttccatacatcctctgaaatctaggtggaagttctcaaagctcaactcttgtcttctgtgcacctgcaggcccaacaacacctggaagccaccaaggcttggggcttgcaccctttgaagcaatggctcaacctgtatcctggcccctttcagccatcacctgagctggagtggctggaacccaaggcaccagtcctgaggctgcacagagcagcaggaccgtaagctagacacatggaatcatttattcctcctaggtctctggacctgtgatgggagggactgccttgaagatctctgacatgccatgaagacattatctccattgtcttggmaatttaacatttggckytttgttacttatgcaaatttctacagctggcttgaatttctttccagaaaatgggtttttcttttctaccttgtggtcaggctgccaatttttaaaacttttcatgttctacttttttwaaaaaaataaaagtttcactttcagataatctctttaggaatgcatatgactaaacactttcagaatcagccaggtaacctcttgaatgctttgctgcttagaaatttcttcctccagataccctaaatcatctctctcagattcaaagacagatctctagagcagaggtgaaatgccaccagtctctttgctaaagcatagcatgagtgacctttactccagttcccaataaattcctcatcttcatctgagacccccttaatctggacttcattgtccatataattatcaacactttggtcaaaaccattcaacaagtctctaggaaaatccaaactttcccacattttcctgtctacttctgagccctccaatctgtttcaacctctgcttgttaccrtttccaaagttgcttccacattttcaggttatctttgtaatagtaccctactctgccggtaccaattctctgtattagttcgttttcacactgctattaagatactacctgagactgggtaatttataaacaaaaggagtttaattgactcacacttcttcatggctcagggggcctgaggaaacttaaaatcatggttgaaggtgaaggagaaacaagtactttctttacaaggtggcaggaaagagagagagggaagggggatgtgccacctttaaaccatcagatctcttgagaactcactatcataagaacagtatgggggaaactccccataatccaatcacctatcacgaagtcactcccttgacacattggggattacaattcaagatgagatttgggtagggacacagagccaaaccatatcagttccttataaaaagacttaakctagttaaactgcaatgtgtgtctctggagaagaaccttatttatgaataagatggtttcaaaagatccattttctaagatatagaatttagtttgggaccaattccaactcctgatgcaggtaaactgtagtaatctgcagaccttctttyactgggtttccaaataaatgttccaacatgcaatacactttctgagcatctactctgtgtcagacattttaggtactaaagagttcatggtgggcaagacaaaacttctgctacatgtgtgagcagtctaatgctagacactagactgagttctgttaatgcactagctcatttaatttaaggatcaattatttgtcttcgatgtctgttagagttttagtaacttgtcttaagattctgcaacctgcaagtgatagaggtcagattaaacataggcagtttgacttcagtgcccagacgcrcacctcctatatgtagtgtctatctcttagtcaaagcttcttttgctktggctccaaatgcagtttaagctgtaaaaacatacatttgtggccagacatagtgactcatgcctgtagtctcagcactatgtgaggccgaggtgggcagattgcttgagcccaggagtttgagaccagcgtgagaaatcctgtctctataagaaatacagaaattagccaggcaagatggcacaccccttgtagtctgagctacttgagagactgaggtgggaggatcacttgaacttgggaggtcgaggctgcaatgaactgagatggtgccactgcactcagcctaggtgacagggtgagaccctgtctcaataaaaaacaaaaacaataacatacattgtgattgttaaaaagtagcacatcaaaaagcttatctaccacaatcaagtcagcttcatccctggatgcaaggctggttcaacatatgcaactcataaaacgtaatccatcacataaacagaaccaatgaaaaaaaccacataattatctcaatagatgtagaaaaggccttcaataaaattcaacaccccttcatgccaaaaactctctcaataaactaggtattgatggaacatatctcaaaatagtaagagctatttatgacaaacccacagcaaatatcatactgaatgggcaaaagctggaagaattccctttgaaaaccaacacaagacaaagatgccctctctcaacactcctattcagcataatattggaagttctggctagggcaatcagacaagagaaggaaataaagggtattcaaacaggaagagagggagccaaattgtctctgtttgcagatgacatgactgtatatttagaaaaccccatcatcacagcctcaaatctccttaagctgataagcaacttcagcaaagtttcaggatacaaaatcaatgtgcaaaaatcacaagcattcctatacaccaataataggcagagaaccaaatcatgagtgaactcacattcacaattgctacaaagagaataaaatacgtaggaatgcaacttataagggatgagaaggacctcttcaaggagaactacaaaccactgctcaaggaaataggagacaacacaaacaaatggaaaaacattctatgctcatggataggaagaatcaatatcgtgaaaatggccatactgcccaaagtaatttatagattcaatgctatccccatcaagctaccattgactttcttcacagaattagaaaacactactttaaatttcatatggaaccaaaaaagagtctgtatagccaagacaatcctaagcaaaaagaacaaagctggaggcattatgctacctgtcttcaaactatactacaaggctacagtaaccaaaacagaatggtactgttaccaaaacagatacatagaccaatggaacagaacagaggcctcagaaattgcatcaaacatctacaaccatctgatctttggcaaacatgataaaaacaagtaatgggaaaaggattccctatttaataaatggtgctgggaaacctggctagccatatgcagaaaattgaaaccggaccccttttctacaccttatacaaaaattaagatggattaaagacttaaacrtaagacctaaaaccataaaaaccctagaagaaaacctaggcaataccattcaggacataggtatgggcaaggacttcatgactaaaacactaaaagcaacggcaacagaagccaaaatagacaaatgggatctaattaaactaaaatgcttctgcacagcaaaagaaacaatcatcagagtgaacaggcaacctacagaatgggagaaaatttttgcagtctatccaactgacaaagggatagtatccagaagacaaagaacttaaacaaatttacaagaaaaaaaaaacaaccctatcaaaaagtgggtaaaggatatgarcagacacttctcaaaagaagacatttatatggccaacaaacatatgaaagaaaagctcatcatcactggtcattaggagcaatgcaaatcaaaaccacaatgatataccatctcacaccagttrgaatggaggtcattaaaaagtcaggaaacaacagatgctggagaggatgtgcagaaataggaaagcttttacactgtgggtgggagtgtaaattattagttcaaccattgtggaagagaatgtggcaatttctcaaggatctagaaccagaaataccatttgaccccacaagcccattactgggtatatacctaaaggattataaatcattctgctctaaagacacatgcacaggtacgtatattgcagcactattcacaatcgcaaagacttggaatcaacccagatgcccatcaatgatagactggataaagaaaatgtggcacatatacaccatggaatactatgcatccataaaaagggatgagttcatgtcctttgtagggacatggatgaagctgcaatccatgaatctgttcctgtgtcagtttgctgagcattctcaggaacagaaaaccaaacactgcatattctcactcataaaggagttgaacaatgagaacacatggacacagggaggggaacaatacacaccggggcctgtcagggggtgaggggctagggagggatagcattagtagaaatacctaatgtagatgatgggttgatgggtgcagcaaaccaccatgtcatgtgtatacctatgtaacaaacctgcacgttctgcacatgtatcacagaacttaaagtataatttttttaaaaaaatgaaccactgcaaaatgtaaaagaaaagaggaattaggttatatgaggtgaaagtaacctatctgcaggctagtaggcaaaaactatggtattgagtgctgcttcttcctactttgtctagaatcatctttatggctttaattaacctgtctttagaataatgcttcttacccggtacttataacttgacaagattacagagaatggccattaataatggctggatttgttatcagttgaaattgccatttatagaaggtgatataattggtggccgtatatattataattaattgtgataattatggctgaagagtcatgatttgtgaagaaatatttatatagtgttcaagataaactttgggaattaaaatggcctgactcatgaaggaatcacatggaggattatattaagctactgctgattttcagtgagtgtcacaggagggtgaatttttcatttagttgtctccactggagaacaatcaaatgtcatatctgttggccaaataatagtctatatgtgtaattctatatatttttcagttccttaactttgtaaaatatttgaaactaaaattgatccttattgtatttctaattagttgctgaaataaatgtcagaaatattttcctttttagcacaatttatttttgattgtttatcatggcaagcattccagggagactccttaggaatgttcagcagaggtgtctctggtaattgacttaaatgttgttcaaataatttatagcttactaaagttagccaggcttggtggcaggtgcctaatcccagctactcaggaggctgaggcaggataatcgctggaacctgggaggcggaggtggcagtgagccgagatggtgccattgcactccagcctgggcgacaagagcgagacttcattaaaaaaaataaaaaaaatttatagctttccatcactgcctgcctgccgttattggagacttggcctgccaggtgtttatgtcagtctgtaaggaaccgtactgggtcagggcctatgtggttgtggtagtgaaaatctagaaataggtaccacccttcctttgtccttcttgctgtcttgcaccacaacattttctagtagccaactccattttgcttcgaacaggcagaatggaacagagtgagtaactacaaaggagaaggagatacttgtaggagatactgcagagaactgcagaataaaagaggaatatggctgaaaagagtcccrggctgggacctcagtacctgaaggcagttgacactgctgtatatgctgacttctctatatcttggaactgtgaatacaaaatgactcttgggtgagtcaaaatttctgtatatagcagactctgcatttggagtctctccttctgtcaaaagctcctggtyttctatgtggaaatgcattcttttctctactttccttattcttttatttgaagtcacgtttttaaatactaatagatcacctacttccagttgttttcaatctcttaactgacttccacatcttgttgccttcagggcaattcattttgtagaagtagggttcttctrcaaaatgatgaagaytgtctcacaaatgtggcctacctttctttacacagactgtgggtgctacactgtggtcagttaggcttagcatattatgctcttctttctattatttctcatttgataaattttaatttttcaactgcaaataagtccttttgtcttttaaaaaattgtaatatgtgaatacctgttagatgtgaacaagtcaaataaaacaatatttaaaaattaacctttccctgtactgccccacttccacaacctcgattcctcaaaaataacccctgttaatagtttggtgtatattattcagatttttgtaatatagaaacacacatttagtttagtgagtttttttaaattttcataaataataacatagtcaactgttttctccagctctttaattttaacaatatgttttagagattactttatgtctgctagtttgaaggtgtctcctccacagttcaggttatattacggtattaagaggaaaggtcttaaaggtgattaggcaatgagagctacttccttgtgaatgggattaggtgcccttataaagaggcttgatgaaggaagtccatccctttttgccctactgcctttcaccatgagaggatgcaccaagaaggccctcactagatgctagtgccttgatcttggacttctcagcctccagaagtatgataaataaatttctgttctttataaattatccagtctctgttatagcagcataaaatggactgataatgtctctctctttctctctcatgattcaatatatactgctactcgttctttataagggatgtaaagcattccataataaggctatgtcatgatttattaataccttattggtaagtgtttgttctagtttttttgccattacaataatatagtcttatgtacaagtgtcagtatttttcyatggcagattacaagaagtagagcttaaggttgaagaacagaaaaaaaaagttgattgatcctgccagttgaaattgatacaatgaaattatcagtayattaactatattcccatgaagagtttaggaaagtaccaattgcctgcatcaccaccaacacagtttattattttttaaactttgccaaaataattgataaattatatttcattttcatttaaatttgygtttctgaactattaatgaagttaagcatttttcrtatttgtaaaagccakttgcattttgttcctgtttatttctggtattctatttttgcatgagactgcttttcttatgcatactatcaaatgtattatataaaacatggtttaatattgtgaatattatttctttgtctattacacactatgcttttgtttcaagtttttcacttgcgtttatrctttgttttgtattatttagaaaaggtttatactttcatttactamatttatcaaagttcattcttttataattcttgggtttttcattttatatagaaaaagcatcctcttgaaaaacacataaattctatatttacttttaataactttagctttaaacttaggcctttaataaattgatttattttttgtttggtatgaggtagtgatctaattatatgttttctagatgaatagccaatatttccataaactatatattgaatcacttctccttttgcaaataatttaaaatgcccattttcataaataaaatgcccatgtataaacacaatattttatcatgttttcctgttctgttaatacagtcccaaatctctaacagacacattgcatatttaatttgtagtttctgatgactaagttgagtaccttctcttacatttattggccaattgaatatcccctcttatattggatgttttgcctatttttatccgtcttctttgtcttcttattgattaaaatgaattatttatatattctagatttaggttctttgtgagctatacatagaggaaatattttctctaactatatagcttggcttctagtgcacattttttaaaataaaaagaagtccttaatcttaatgaatttcaagtaatcaatattttctttgttatttctttttgtattctgtttaagaaattagtttgtttttccagacatgaatgttcttggattgtttttcttctataactttaacatcatcttgttattattcaataataagataatttttaaagtaattttaagttttattttagattcaagaggtacatgtgctggtatggtatatgggtatattgtgcgacggtaatgcttgggatacaattgatcccgtcacctagttagtgagcatagtaccccataggcagattttcaatccttcccctttcctatatccccgctctagtacttgccagtgtctattactctcatttttatgggcatgagtacccaatatccagtttccacttataaatgagaacatgctgtatttgcttttcagttcctgtgttaatttgcttaggatatcggcctccagtttcatctattttgttgcaaagtacataatttcattctcttttccggctgtgtcgtattctgtggtatatatgtatgacattttatttacccagtgcaccattgatagatacctaaattgattccatgtctttgctattttgaatagtactgcagcaaacatacaaatgaatttctttggtagagtaatttatttacttttgtaattccatacccagtaatggggtgctgggtcaaatggtcgttctgttttaaggtctttgaggaatatctaagctgttttccatggtggctgaattaatttacattctcaccaacactgtataaggatttccttttctcagcagcctcaccagcatctgttgctttttcagtttttaataatggccattctgactcatgtgagatggtatctcacatgactagtgatgttcagcagttttttcttgtttgctgactgcttgtatgtcttattttgagaagtatctgttctttgcccatttttaaatgcagttttttggtttttgcttgttgaattgcttgagtttcttttttcttttgttttcttttctttctttttttttttttttttgagacagagtctcactcggtcacccaggctggagtgcagtgtagcgatctcggctcactgcaagctctgcctcccaggttcataccattctcctgcctcagcctcccaagtagctgagactacaggcgcccgccaccactcccagctaattttttgtatttttaatagagacagggttatagagaccaccgtgttagccaggatggtctcaatctcctgacctcgtgatctgtccgcctcggcctcccaaagtgctgggattacaggcgtgagccaccgtgtttaagtttcttaaagtttcagggtattaaacctctgtcagatgcatagtttgcaaatattttctgtcattctgtaggttgtctgtttactctgctgatgatttcttttgctatccacaagctgtttaattaggccccatttgtccatttttggttttgttgcaattgcttttgaggacttagttataaataaattcttttctaaggccaatgtccagagtggtgtttcccaggttttcttcaaggattcttatagtttgagttcttacatttaaatcttgcatccatttgcagtgaattttcgtatatagtgaaaggcagtcatccagttttattcttctgcttgtggtcagccagttaccccagactcatttattgaatagggattcttttctccattgcttattcttgtcaacattgtcaaaaatatggctataggtgtacagctatatttctggggtttctattatgttccatgggtctatgtgtctctttttgtacaacaaagtatcatgctttgttgtttactgcagcttccgtcacagtttgaagtcaggtaatgtgatgcctctggctttgttctttttgcttaggaatgctttgactattctgtctcctttttggtcccatacgagttttagaacagtttttttctagttctgtgaaaaatgacatttgtagtttgatagaaatagtattgaatctgcaggttactttgggcaatatggccattttaatgatagtaattcttctaatgtaggagcatggaatgatttaccatttgcttgagtcatttatgatttctttcattagcattttgtagtttcccttggagagattgtgcaccaccttggttagaggtaaacctaggtatttttttgtgtgtgtgtggctattgtgaatggggttgcattcttgatttggctctcatcttgaatgttattggtgtatagaaatgctactaatttttgtacactgattttktatcctccatctttactaaatttgtttatcagttccaggagccttttagaggagtctttgggatttctaggtatagaactatatcatcagtgaagagaggtagttccactctcctttttctatttggattccttttatttcctccttttacttgactgctctggctaggacttggtcctgtactatattgaataagattggtgaaaatgggcatccttgtcttgttccagttctcaaagggaatgctttcaggttttgcctgtttagtatgaggttgcctctgggtttgtcatagatgctacttattattttgaggtatgttccttcgatgcctagtttgctgagggcttttatcatgaagaaatgttggattttattgaaagattttttcttgtctattgagagaattgtgatttttgattttaattccatttatgtgatgaattttatttatggattttcatcagttgaaccaaccttgctccccaagaatatagcctagttgctcctgatcagtttatttcttgatgtgctactggattcagtttgctagcattctgttgagaatttttgcgtctatgttcatccagaatattagcctgtagtgtttttattttttttttcattgtgtctttgtcaggcattggtatcagggtaatactcgcgtcatagaatgatttaggaaagtgtccttcctgctcaaacttttgcaatagtttcaggaaaattaatatttgctcttctttatacatctgatagaagtttgctatgaatccagccagtctggggcttttattggttggtagactttttattactgattcaatattggaacttgaagttggtgtatataggatttgaatttattcctgattcagtcttgagggggttgtgtgtttctaggaatgtatccatttcctctaggttttctagtttgtgtgcataggtatgtacataatagtctctgaggatcttttgtatttctgtgggattggttgtaatatcacctttgctgtttctaattgtgcttatgtggatctctcttttttcctttgttaatctagctagtgatttatagatttttctttaacctttcaaaaaaccaactttttggtcatttattctttgcattgatttttgggtctcaaattcatttagttctggtctggttttagttatttcttttcttctgctaacttttgggttagtttgttcttgtttttctagttactctaagggtaccattaggtggttaatttgaaatcttcctgaatttttcaggtagctgtttagcactacaaaccttcctcttgaaattgcttttgctatatcccagagattttggtatgtcatgtcttcgtttttatttcaaataattttttttatttctgccttaattttgttgttcacccaaaagccactcatgagtaagctgtttaattttcatataattgttttactttcagtgatttatttggcaatggtttctatttttatctcactgtggaccaaaaatatggttggtatgattttgatttttttgaagttattgaggcttgctttatagccaaacatgtggtcactcatagagtatgttccacatgcagatgagaagaatttatatttggtagttgatggatggagtattctgcagatgtctattaggtccaattggtcatgcgtgaagtttaagtccacaatttctttgttacttttctgtctggatgactggcgcaatgctgtaagtggattgttgaagtcccccactattattgtgtggctaagtcttttcataggactagaagtactcattttatggatctgggtgctctaatgttgggtgcctatgcatttagaatagctaggttttcttgtttaattgaaccctttgtcactatattatgtctttctttgtccttttatactgttgttggtttaaagtctgttgtatctgatataagaatagtgactcctggtatttttcttttcattctttctttttattttctgtttgcatgatggatctttctccagtcctttactttgttcctgtmagtgttgttacatgtaagatgagtctcttaaagatagcaggtgaatgagccttgcgttttttttttaatccaacttgaagttctgtgccttttcagtgatggcatttataccatttatatttagtattggtatgagatgtttccataytgattatcaggaagctgttagctggttgctttgtagtttcaaatgtgtggctgctctataatgtcttgggctatgaactaagtgtgtttatgtggcagtaggtattgttctttcattttcaggtttagaattctcttaagctggtaagagaattcttgtaaggctggtctgctgaaaacaaattcccttagttcttgcaaatctggaaaagattttatttctccttcacttrtgaagcttaatctagtgagatataaaattcttagttgaaatttttttttctttaaaaatgcggaaaatatgtccccartctttcctgacttgtaaggtttctgctgagagtctactgttagcctgatggagttccctttgtatgtgatctgacatttttctctagctgcttttaaggctttttttttttttcaggtttgactttggacagtctggtgactatatgtyttggtgatcttcatttcatataatatcacacaggttaggtgttatctggatatcttatatttggatgtttacctgtctagcaagattagaaaaattttcttgatttattccttcaaatgtgttttctaagccatttactttgtttccttctctctcatgaatggcagtgattcctaggttcagtcactttacataatcctatatttctcaaatagtttcttcattctttgaaaaaaaatcttaaaaaatttttttttctgactgggtttaaaattctttcttctgcatggttcagtctattgataaaggtttcaaatgtatttttgaaatttcttaagtgagtttttcaattccaaatgctctgatttctttttaagatatttatctctttcttaatttcctgaattgttttagaagtttctttgtgttgattttcaatgttgtcttgaaatcattgtacttccttgcagtccatgctttgcttcctttatctgtcatttctgagtttctgttttgattagggataattgctggatagctagtgtgatcctttttaaggatcacagggtctcactctgtcacccaggttggagtgcagtggtgtggtcacagctcactgccaccttgacctccccagactcaggtgatcttcccacttcagcctcccaactacctgggactatgggtgcataccatcacacctggctaatttttatatttttttgtagggatagggtttcaccatgttgcctaggctggtctcaaactcctgggctcaagcagtttgcctacctcagcctcccaaactgttagaattacaggtatgagccactgcacccagtctctagacatttcatggtgtcagatttttgcattggcttttttctcatctggagacactggaacttctagtttttgtaattattttcatacagtagggttttttctttttctgtagtattactgtttctttttctttttaattcccttttattcccttcttagatggtgtgactatagaggatgttgggcagaatcttttggccttgcttctgtagccctgtgcrcttctgtcaataggttttgtattgggctgtatggtccaacctataagccagtagatgacacttatgggtaagtaacagctgcagccaatgcaggtggacatatactccatcattgtttattaagacctctctgtttcctcaggcaatggggtgatccatggagggctcagtggtctgagctccatgctcagccccagggagacaagaaaaagatgggaggggccagacagggctggcccatctacagtttccctgatggcgggcactagtactaagggagaattctgtaggcagccactaagtgcccagagctgtgcctagtcatggagctgagaaatctcctctgcccaagctctttgcatggggagggggacagcctaaatgcctaattcatgagagtgaatataccagatacctggagatctgccttaatgttgagtgcagaggaccctgctgcactataatatgcacagaaaggatgggtcagcttaagatgctaatctaggtgaatgggatatgcctggtcatgtgttgaagagcccctccactcccttaaccatgatctcttcactggaagagtgggtttgctcaggctgctgattcaagttagtgggtgctccaaatgcccagagatatctgctagggcatggagtggagagggccccacttcaccacgatctcttcacaggtagggtgggtcagctccggttgcttaaccaggcaagcagatgttccacatgcctggagatctgctcgggcatggatcagagagtgtcttactttaccacagtctctgcataggaagggtaaggccattctggctgctgatcagggaaagtgggtgctctgaatactttgaagtgtgcctgggtgtgaagtggagagaccccctggaaaccccctgctgcagcaggatatctgcacaggcagggtgggtcagctcagtctactgatccatgcaaattggtgctccaaatggctggagacctgcctgggtgtggagctgagagggctccgaagcactacaatttaagctcaggaaggatggggtggctgcgaatgctctaaatacctgcagatctgcctgggcgtggagctgagagtgctctgatgcacgatgatctatgcccagggatgttagggcagctcagactgctgattcagaccagtagtgctctgaatgcctggagttttgcctgggggtgaaatgaaragagccctactgcaccacaatctcaggggaactggctggggcacccagcaatacacacacacagacctgttctgtattgcygagctggccctggctgtagctcttgttgctcaggagaaaccgcagatctcttcctgctacaggcctgcaatttgggaaagcacaatttcagtacctactgttgaggcactttccacaattctggctgtggttccccctgccccactccagagcaggcacctcaacctctggactgagactaaaatgcctgcatgaccatgttgctgggtcactaaagaatgactgtctttatatgcactcagattaaaaatggaatcctgatcttggtcctcattctgggaaaattcctgaagcttttcctggtgtcttttatccctctcagtatttctaagcctctttycaagttaacttcaggacttggggaaacagtgttctccatcagcctgggttgcttggatccccagtggaaaggtgagtcacagaaggagactctctgcctctctcatatccgggggaatcactcacttttatcagctgggtgctttcatgatgggtgtttgcctacattctcctttctgggacctgtggtgtccttcgtgagtccatgaatagattcctgctttccttcttaaagctcacagaactgatctatttccaagtagctgaggcatactaaaagctcctaatctgccatcttgggcaaaaaagggtccactgtccaataataaacacacactttttgtgttcttatacatacatatgtacatacacacatgcatatgtgcattcatgtacatgtatgttgtattagtctgttctcacrctgctatgaagaaatgcccaagactgggtaatttatttaaaaaaaaaaaaaaaagaggtttaattgactcacagttccacatggctggggagaccttaggaaacttataattacggcagaggcatctcttcacagggcggcaggagagaatgaatgcaagcaggggaaatgccggacacttataaaaccatcagatctcatgagactcactcattatcatgagaacagcatgggggaaactgcccccatggtccaattacctctacctggtcccacccttgatttgtggggataattacaatcaaggtgagagttgggtaggkatacagagctaaaccatatcataggtatacatatacatacatacatttacatcctcttccttatcattacatcttctttacctctccctttcatgttccctctgattttctcacactagggaaaatggaattacgtagaaggaaattgcgaatgttcagtrttatcaaarctgccacctaaatactaaatatagacattaacaggtcagagtagaagaaaaggataatatttacacgacaatatgtaagatgtattttataaattgacatttatttgtaagaaaaggctcttattaatttagtaagtgatggttatactattaacagtatagaatatgtactgcaaattgagagtccatatcatactaaatgtcaaaacaatagaagcaatgctattaaagatgagagttattgaagaacatcagtaataatattatttataatttttaaaagcactagccaatgcaattaaacaagaagaaaaataggtatgaataccagaaaaggtaaaattatcatcagtattaagtgatatgttyaattattagccagtgtaattagtcaagaaaaacatgaaagctagaaaaaaggagtgaaacttaacattattattaaaygttatgattatacctatgaaacacaagagaataaattcaagaattgttgcaaatggtaggatgtttatgtggcaattaaaaattatgggaatatagaataactaatagcagaaagagatggtcagattggcttatcaaaacattcagaacctatataaaaaaacattaaaagtactaggaaatgatgtaaaagaaatctgccttgaattaatagaagtatgtaacccattcaactgtataagggattatattgtagatgtggcaattttccctaaatcattaatgatagaattagtaacatttatagtacttaccagtagccaggcatggagttaagtttatacttgtttttgtttctccattatctttacaattctcttatgaaaaagtgaaagtattatgactatttatatagatgagacaacaatcacagaaaatttagctttctcatgttcacacagctattaataacacagagaacctaaatatgccatagtctctccaagttgtcagattttattttgtattcaacaataattcatttagaatataagattagttaagaaaagttaggaggagtaatgtgaacaattaaatttgtttgatatatatttaaatgctaacatatcttgcataggtctagaaataaaaaggcaacttaatgaaacagaatggagagataaaaaatagacaccagtgcatgcacttcagaatatgaacaatttcaaaataacgggaaaagcttcaaaaatcgtgttataatgattgggtatgtcaactaaattgtatatcattacaccaaatggaatcacatgcaaatgacacttatgtgtaaagagtgaaagaaagtcwtgaaaataaatgtttatgtgaatwtataaataatcttgagtgggaaaagtctttctatgaatgaaccagtatccagaatttacaaataaagactgataaaatttgttttaaaatgatttaaagctgctaagaaaaaaaaaccttataaacacaatcaaaattcagaatacgagcaaacatacaacaatttaaaaggtaaagtttatttttcaacactttacaaagaaaatttccttattaaaaagcactcacaaattaaaaagaaaatgagccaatggtagttcgcagaaaaagattaatgaaggccaataaaatattttcaayttcacaaataatgaggtgagattctgaaacagaagttccctaatctcactcgcaggcacgcgatgggggtgtggctcatttctttggtgctccgctgckcatacccstaggggagcatgcagacgggcaagtcctgagcatcgccgaccccacagcaccttcgagggttgagtgtttacaagcccccgaaaccccggtgggcgtgtgttaccatgccactctcagtkttgccctctgcaggccgcttgtgttartcagctcagttagaccctctctgccttgtcgcaaggacagagsgctttctgtatcctgggttctttatgtagtgtccagaaaaattggatcacacgtggggttggagaatgagtgcaaggttttttaatgagtggtggaagtagctctcagcagatgaatggtgagccggaagaggaatggagtgggaaggtggccttccccggggtttgggccattcagctgctggcggggctcttctccgaccacccccagcggaattccacatagtcctgctgtcgatgacctgcatttgctggtgcctgtcggtgtgctcttctgctcttcttgacctccaactgcttgtgtgttcttcggctggcatgtttctctcaacatccagccacttgtgtttgtgcccgctatggtctctgtgtttctgtaagcacaggatgggggcatggcaggccagagttatcttggacatcgcaacatttgggtgtgaaaacacaactgtctgtcctcacctaggtccgtgggcacaggcccgagggtggagccctcaccagggaccccacctttctatacccagcacttccctgcccccctcccatatcaattccgtttgtctctcctcaaattgtcagatattaaacagtattggagaggttgtgagtgaatggacactcacaggctgttggagggatgggctactttctggggcatagttggtaaaacccatcacagttaaaaatgacgtgtctgagcccttctacttctagaatggatcctagagatagagcctcacgcatgkgcaaagatttgcttgttgcagtaatgtttgtaataagtcaaaatagtttaaaaatgatggaaactgaattatagagtagtacacagatattataaagaatgtgccctatatgtgtgtgtctaaacacacacatatatggatatatggatgtatataccttttaatttatgtgtatcggtagtcttgacttatccattgttttgctttccactgctttagatacctgtggtaaaccaaggtctgaaaataaatttaaaattctggaaataaacaatttataagttttaaattggacaccattctgagtagcctgatgaaatctcacattgtcccattccgtcctgtctgggacatgaatcaaccctttgctgagcctgttcgctctgtatatgtctctgctgttagtcacttagtagccatcttgttatgagatcaactgtcatactattgcagtgcttgtgtgtaagtcacccttaatttaccaaataacggctccaaagagcaatagcagtgatgttggcatgttgttataattgttctattttattattagttattgttgttcatcctactctgcctgattcataaagtttatcataggtatgcatgtatagaaaaaaacttagtaaatggagggttcagtactgtctgcggtttcaggcattcataagggatcttgaaatgtatcacccatggataagaaggggctactgtacttaaatttatatacttataatctgttttatataaatagctacatataaaatattagtatctatatacttgaatgttatacaaattcttagaaagaatgaagattctaagattacagttgtaaccagcagtaataatttctggggtattgctgaagctttgcgtcccatgacttgtagttttattcctattactctctggatttctttttaccataagtgtatgttcatttttgtaattaaaaatctagttaaacattgattctcttttcatttgactcaagaatatattgatcttactcttcaactttaattaagcttctaatctgtattcacaatggtgggttttatcataccctggagagacagcagaggggatctttatgatcttatccaatgacctcatttcttcatacattattaactttgtcctctatcactaatgatagaaaaattattttttattgagaacctgctagaagatagacattctgttgaagggtttatctgtataatataatttaagcttcactgcacctatttggaatggtaataagaaccccattttatagatgataaaactgagactcagatggtttttgtaacttatcccaaagtagttgaataagaatgtaaggcagagctaatgttcctttcactagtttctactgctttccttggtgagttatttaggatttttgtgtatcagtccactctcatcttatgggaatcactctccatttcttgttaactttttgatttattctcactaatgaatacaacatgagaagatacttttaaaatcatttgaaatacagactatagtatctcagaggttacatctcaagtaacttcagggacagacagatgaatgcagtgggaaggagcyaaactgcaggccagtgtaaacatttctggggtccarcttagcaccatgacatgccacgtgggacctctccacaaaaagaaatggtaaaatagtacctaagaatcctattttcacatgttttcttatattgagaggccatatagcatgatggtcaggaacatgaaaatggagtagggtagacaatggatcaaaatcctggctacctcatttaccagttgtgtggccaaaggcaggttgcttacttctgcaaagctcagttttcacctctgaaaaattttagcaaattgatttctttttaaagaaatatctatccttgcatttctattattcctttcttaactctaaagtcaccttactctctatgcaaaatccataaacagggacctcagtgtttctaattttcaatagattgctttgttcaaaattgttagctatttattatcattattattattttttattattgatagtatttttagctaagrattttggtaagaaacaggctagccttgaacttcatccaggcagagatgttgttagtaccaaaaggatcttagagtatggctgtttcacaaagaaagcattattgaaaattaaagttcaagaaacattgcctatatggttatttgtgggtatttaatttttaaaaagtgatttactctccgaaagttattaaagaaatttggtggcactggttaccaaaaatctgtcacaattaaagcagttgtatctgagtaagaatcacttcattatagatcatcactaaactgtcattaagcacctgctgtgttattaataataatccaatgaacaataccaatctccttattttgtttattgtgcatttctacaactttaagtgacagaacttttttccatgtccagtattctttgtagaataactactgaggacaagaccaaggcatttgctttaaaaattcctgcatattatccccctatgtcctttaaaagcctcattttgtaccttgcatggagtagtgttttgataatttctttagtaaaactaatgacacacttcagtgctacaaatttttatgtaaaagaaatacagtattgattctattcagtgttgcccatttgtgaaaatataacctgatgatgttctagttaattatcatatagttacataaatgtaacaggaaaaatgccattttctatagtgttcactacgaaatttagcagatctaaatctagatgttgttttacattttccttgtctttgttgttggtttattagagattctttgaaagtcttagcaaaaaaagaaaatttgtgttttctcaaaaaataaacaaagttgatctctgtggatttatttgacagaggtttaaagatccactaatactgactgtggccactagtcctaatcatgattgttaatcagatattttgatagaaatagtaagggtaagataaaagatatgccagttgggtactaattacagaatgatatagcatttgcatcattttagaaaacaggccagaagctatttttattattttagcaatttttatctttattagtagagcaatgttcatataatatgctgcatcttgaattttaggttgaaaaagatatcaacgtttttcactaattcatgggagttgggggccatgagttatccattgttttactcataacctaggatcacatagtggaatacaaaacaatagtaatattttcaacaacagcattttcaaaagatttcgtgtgtgaatttttccctttccttgctctggtcagtgctagagcttcacttccccagcttttcatccccaccaccatgctgggccaggggttacccaaaactggaaggcggctcctgcttcttgagatgaaacacaaagcatcacccctcctcctgctctggagtttctggcagatgctccacacatggaataaaaactatgtccgttgcataatttttagatatttgctgccaggctacttgtgttcaaaaggaaaaaaaaaaaaaaaaacctcttgtggaccaaaaaataatgttaaaactttcaaatgtgtgtaaaagtacgaattgtctggagacacgtaggggaaacacctaccattcgattgaattgaactgtgtgtgggtgtgtctttgtgtgtgtctttgcatgcacgtgcagtggtttgtctagccagttcactatgaatagtagcaatactttccccaaaaggagatgtatgaaacaagaagcattttgaaaaaggaaatgccctatccacaggsccacttcataacaaaactatctttgattttctacaggcgtttctggtgcttggttacacttctatccatgtttcaaatgattgtaatcataattcatacatcattagtaatttatatgtcgctcaaatgagtagttttctgaagcacatcacggtgggccaaaggatgtgaaccattagctgtttcaccaccaaggttctctcctggagggagcaggtggcaaaggggtcaacagggcaaaagcgccatctatgttcttgtctgagaaaagaagaaagggtaacttatcttttgttttaaagtagtgtatttgttaattcaacacatttactaagaactcttatatgctgggaatcatgttaaaagctggatttataataacaatgcccttccggagatacagtctcacgaaaagtcaagacagtgggaaacagtaggaaaagtattccagctactgtgggagaacatgacaggaggtatggcttcaaggattatcaagaagttcagtgtgggtgaggcacagagtgtgagaaaagccagcaaasagctgaggttgcaggagcagttgggggtacagtggcagcagatcagattgatattttggatgatgtttggagagggaattaaatgagcaaacatgaaagcaaagagacagtttaagaggcaactgtagtaatcccagggaaaagagatggaaccagggcttgggcagttcataacaagtcagggagaatatttagaaggtagtattaacaaaaattacagaaagaagaaaaggttacccataaccccaccatcaaaagacaaccggtawaattcccatcagacatttctgtgtgtatatatatatttatatatctacatatatgtgtaatcactagcacatttatgcttaccacctacatattttttattgtgttgcagagcctaggtgaagtagatggagtttatcttcatcactgtatatcttttttgttaaggtttttttccctaatttggtcataccctctctcttccaggtgcttgatatctttattttgtgtcacatccattttcatccaggcatttttttacttctaacttctttatttcctgtacttattatcaaaaccaaccccatttttatagggttgctttccggatccagtggtagggagaataatggatctgcaaagttgtcatcyctgaaacccgtaaataggttacttcatatggcaaagtgcactttgcagacctgagtaaggacctcaagattgagagcttaccttgtaataatacaagcccacctggattggctcaaggtaatcacaagggtccttaaaagatgaaagaggaaggcagaatcagagaagatatgaagatcgaagcagggatgtatgtgtgtgagagagggggagatttgaagatgctatactactaccttgaagatgtaggaaggggccaagggatgcaggtggcctctgcacactggacaaggcaagaaaaccaattttctcctagagtctccaggaaaaacgcagccctgcaaacaccttaattttagctcagtcaaacccgttttggacttctgacctccagaattgtaagacaagaaatttgtgttttaagctgttaaatttgtgctaattcatcattgtagcaataggaaaccagtatggatatccrtgttgaaacatagtagagttaatcatattgagggatcagtaactgacaaagattaacrtgttactttttttctgtttgtgtgtgtgtgtggtgtgtgtgtgtgtctgtgtgtgtgtgtgtgtkagacagggttttactctgtatctaggctgaagtgcaatggtgcaatcacggctcactgcagtcttgacttccacagctcaagtgatcttccatctcccaggctcaaacaatcctcccacctcagcctcctgagtagctrggactacaggcatgcaccacattgcccagctaatttttgtgggttgttttttttagagatgaggtttcaccatgtttcccaggcttgtcttgaacttttgggcttaaagcaatttacctgccttgacttcccagagtgctgggattacaagcatgagccactgcacctggcctatcttttcttttttaactccaaggaaagacttactaatgttaaaattctggaaatcagtctgstggaggagatatttggagtttgggtgcaggcaggtgagtggcaagtgtgkgggatgtgaggaacttccttgaagtccttctcaatactcaggttcccaggagtcaccttgcttccttcaagtttcacagagactcaccaaccagctgagttcagtgcaagatttgcatgaaaatttcttttcagttataatggattttttaaaaatgtgcatttgtgtgcatctataatctcagtgtgaatgtggattcagatactgtggagcacagttttacatgttgaattttacttatttttatatktaaaattgatattttgaattttgcatcagcttagctcattatttccaaggggttgtgcactgacatgtctttgaattatgatctctccccaaagggaatttcttgcgtcttgaataaataacagatgttgaatgtgagggagctggggctggaagagaatgcrtttgcagaatatgagaggatattttctgttggtggatggaactacaggattgaatagatgttcaatgaaatgtaagaaatagaaaagctagagtatcacttgacacttgcattgttttcaatttattgaaaacatcatcatcccttttgcctcagagacacatctgatgcaaactctgtcactcatcctttttttctactagttggagaggaaaaagaaaaaagttttttcactgtatcttacaggcctctaaaccaaagctttagactccaagaacaaaagaatatcaaagatcttattggactgtgaagagaaaagtgatctcttaggaaactggggctttatagatttaaatttgcatctgaaattttcctaacctgaagcatagtcaactttaaatagacacaggtgaagcccgcctctttgatggactctcctggtggtgttccaggactccctcagagcatattactgtgatcctctctgaatatttcagaggatggaaaagtggggctggcaccaaatcaggaagaaggtggtgacagagtctcaatatcaaatgactctaggatgattacacagggttgccagataacttacatttgtatcacctgtaagtatacatgatctcagtacctcagagcaatgctgggacaccagtggagaagacattataaaccccatttaataaccttggggatgatgcctaagagatgttaaatcatttatctcacattacagtcttagtaagttgtaaagccaaattggcaccttggattaatactttgtccaaagctgaaaccagcataycctgaacttgtctttcttcaggagtaatctgccaatgatgccttgaagcccaaacatctggagtacctaaaaaaaaaaaaaaaaagaatcctgtgctccacctcagatcctctgggtatggaatttggaattctgtawtttaagtaagttccccagggaattcttttgygcactaaagtttgagaacttctaagcctctgaagtcccttgctactcaaagtgtgatctatggaccagtatctcactagcaccagcatcacctgrgagtttctctgtgagaaatgcagaatcttgagaaaaattccagacatactggatcaggatctgcatcataagaagattctcagggatttacaggcacattgaaggatcagaaatagtggtataaacctcagcgttgaaggctaataaaatgtctcctaagatggaatgagaaacaattgggacttggtacatctgacttttggttttccctgaatcaagtctgctgaattctcatttctctgtttggcatagcaagggtcaagggctacacattagagcgcccactcagtctttgactgtgtgtcaacaagcttatggaaaatgctgctccgctctscagactgcaggagtgaggcccatcagataggaaaactctagctatcttgttatctctgcattcagtctgctacacaaaactgaaccctgtgataatcctgatcagcattaagaactgaaacttgaggaaagagaatttgagtaagtggaaaattctagaaaggggaccccaggagggaatggaagttatcaaccaacacaggtgcctggacctcccattcctggagaatttctgtttccaaaactgtaatagtgaatagaaggctacctgttgagcttaagataccgagaaaatacttctgataattggcacctaccttgcaaaattaacaacttccttatcccttttgtgaatttcatatttgtttcagaaaatccaagtgtttcaaatattcataaattccagggtttaatgtcgttttagtaattagaagttcataatggagagagaaaacagcagatttcttatactgtttccagtatgtgattcatacatgacaggtcacctgttaaaagctaartgaaattgccattatactcaagtggcaggatatattcctgactgacgcagaatgaaagggtgtgatttaaagggccagatagaaactgtgtttctagtagttacttgaagagacagcatattttcactttagtctaaaatattgtgatagaaaagagaaataaatgtacatggaaataaaacttgtaaaaatactgagcaaaaatggattctcaatttttttttatcaaggaaaagcattgatttactcatgttaaatgtttttctttaaaaaaaattccctgcttatgtagctccctaaatcacaggagaaccaagcagtcatgatgtttcccataggatcacatgatttatatttaatttcaaatacttggtgctttgaaatcttttaaaattaatcttaaagcacacatataaaaatagaatggaagagagtayattmcatctcctttgaggaaaaagaattcctaacaaagcaatcagactctaggatgccatcagcacacctttgaaaagtgaaagcagacagtattaaacttttaaaagcttactttgaaggaatgtggaatttgttaatatcattttagtgaggaagaaaagaagagactgtgttacattatttattccaggatctttgaaggcagctgctttttttcttttctcagctggtttgttttagtgttaatgagcattaaactcatatatcaaagacagaataacaaacctttaaatgtcaacccaaaagagatctttatttttctatttgcaactgtgaagcagtgaggataatttaagacacgaaaatgtgaaaagttacctgaacatttataaagagaaaactggaagaggcataaaattgcagagtagttttgagagaaagaattttaactgtgtattcagcacacaacagggagggaaaagaatactcccttaagggattgacaaggtagagttagagacatgcagtaaaaatttagaaatgtagcccattatatttgtctctgaaatgataagtgtgaacatttaggcactaactttattgtaatgtacaaggatgagctgactgatttggaaagcaaaatttcaggtttacaaatgatactaaatgagaaaagaaagtaaataatgagcagtcattcaggctccactaaaggactaaattgttgcagtgcagttgctgaggctaacaatagtggatgtgctgagtttagggcagagttaaatattccttttgtagatagcaagagcaggtytctctgaatgaaggtgtcacaatgtgctgactgaaaagaggtttgaattagaaaaatccttcaaactgggtgattcaacaaatccaatggagagagaaaacattatgattcaagaatagaatacacacctgggcataaaggaattcttaggagttcttgcagctaaactaggctggttctgagcatgtaatttaggagaaagttggaatgtactcatacaaatgagcaggttatctcagagaattaaaggtgcgccttctttctcccaggaccgaaattttgttactgctgcttctgttgttattctggttcttctttacctatcactactattatttctaaatttgattacttttttacttccttgatgcttaggtggcctgtgactttaacggtggaacatgagttgaaagtgtgcaaattagggtgtaactgtgcagagaagccatgcagatcacacactcaaagacagatgtacatatctacggactatcaggtcaccttcgtgaccggactgaagatcacatgacacctcctgctcaaaccatctgtcattgggactgatattccactattaaagattcagttcctgaagacatttttaggtcttacagttacccaagtgcagcaaatactataagagtggtgatctcctatgtcagagtgaactcartgttagsaggagattaatgaataattgttatatttgccttctttggttgctagtacagcttctcacatttacaaacccctgttctgttaggcactctgaattccttacccttgataacaagaaagaatccaatagaaaattcactttgagctgttagtgattctttttatggtttctgctatccagaataatgtatctgcaaagaagagaatagaggacagaaagatggggtaatgcttaaccaaacccaaggaataacttatgaaaacctttcaagcagtttagcacttgcaagagagagataatttggaatagttgggagctcccctgatattcttcaaataattctgtctctgtattcatgagtatgttactggaaggtaagatcaatactttatgaaaattacagtcacattttcataaaggaatagatattttttcttacaattcaatgattttctaggttgtccattttactctcaaccctcaaaagcaagctgattttggagcacaaacgtaagacatctttgaagacaaatgtattccccactccataccaaaaaatataatgcaatccaaatccaaataatagaattttgaataaggtttcttttgtattttatgtgacagaattttttcctttagactaggtaaaggaggatatgtcatagtacaaagaatattgatgacagaaaattgtaggaagatataagaacgaagaaaaattttgttgagaaattatttgcaacgttgtttcagagcacagtcatcttttattttgtttgcttttaagaattctgaactaggatgctgccaggaaacaacacactcaaactaggtacttgaggggaattgaatgaagaaatcacttataaaagaatgggtggggcttatagggaaattcaaaagggatattgcagtactaaagggctagcaataataggaactgttagtcaacccagacctgaaggggcaaggaagaaaccagaaagagaawcttcacagccaaggctatctgacagccctatagcctttttcgaagatgcagcagagagctggaaaaataaaatccttagccagtctctctctcttcccatccagtgatttccttttcctctttctctttggaaaacccaatgggaagccaaaagtcaagggagcttgtggacacaatcaatacagatcagccctttggagcagagcttggtgggaaaaggcagggagcagaccttgagggcygaatggaggatctccaacacagttgctcgttggcattgaatcaaattttcattcaaccactttcaatttttatacctgaattgttcatttttccatatttgtagcatttcagccatctgcccattggtagtcttttgttctcattctgtccttgacaatttcacaagatttgcattgccttatcacccactaacatcatcccgtggtgccgagtacagccacagttgccaccggtaggtctcaaattgaggcaatattctgacagctattcctggattccacagctgttctagagctcagaagggccacattccacaagctgttaggaaacagctaatgtgttctcaaattactgttactgagattttatatcaagaaggaaaagtgggttggttactaaggaacaggtgaagagaagaaacaatacttcaaattgtgctttagtttgcgctcccctagttaggtgcaataagaattaacatgcgtaggttccccactttcttctctctagaatcctgtgatagtcgaatttttctcactctctcagctcctttagagggagtgtttttaattgatatgagagatgttgggtcaagctacagtatacggtaaaggaattgcagaagggtgaaaaagaaaacaatacttatgtgagggctggatgtacagggaaagctgggataattgtgacaagactgtctgaagcatctggagtttaatggaaatggacaggaaagcaaaggggattgctgaggactatgtatttggagccttatcattttttatgtaagcaaatattttgagttttggttaaaattcttatttgctgactacatttcctcaaaccaatgtcattactttgaatcaagactacatagataacaatttgtaaaagctactcttttggaggttgtgggacataattctagatcttagataggcacagagctgtccaagtcatctctctagacccacagctgagagattatgtaccataactgccaaattgttagaacaattttggaaagatgaatgacgtgtattggtagaaagagatattgtgcttgaattagtggttattggaaaaattaaagaaaatcatgaagatcacactgatattaattataaaattttgaaataatcaatcttatgataattcattaaattaagagtataggctgggcatggtggctcatgcctgtaatcccagcactttgggaagccaaggtggacagatagcttcaggccagatgtttgagaccagcctgggcaacatgatgaaagcctgtctttacaaaaagatacaaaaattagccaggcatgtgtggtggtgcatgccactcaggggcctgaggtggaaggatcacctgagcccaggaggttgaggctggagtgagccgtgatcatgccactgtactccagcctgagcgaccggagtgagaccttaccagctgcacgagaggctggggcacaagaatcacttgaacccggtagacagaggttacagtgagctgagatcacaccactgcacttcagcctaggtgacagagtgagactccttctcaaaaaaaaagaaaaaaaaaaagagtctgcagaactcacaagatttcctcccatgaacacctagttccttaagaaattttaaattattttaaaattattttatttatgtaattgacaaataaaaggtgtatatatgtattgtgtacacattggtttgatagatatataattgtgaaatggctaattcaagctaatgtatatattaccttatatatttattatctttttgtggtgagaagagttaaaatctactctcttagcaatttttaagaatacgatatgtacattgttattaactatagtcatggtgttgaacagtagatctcttgaacttattcttcctgtgtaacaggaactttgtatcctttgtaccaagatctcttcaccacatccaccaccccagttctctgcttccacgagttctaaaagttcacacataagtgaggttatatggtctttgtctttctgtttctggcttatttcacttaacataatgtcctccaggtttatccatgttgtcataaatgacaggatttcctgcttttttaaggttgaatagtattccactttgtgtgtgtgtgtgtgtgtgtgtgtgtgtgtgtgtgtatagtatatcacattttctttatctattcctttgctgataaacacttaggttgattccatatcttggctattatgaataagactgcaatgaacatggaagtacaggtatttccttgacataatcaatttcttattctttggctatatactcagtaatggtaaacctggatcgtatggtagttacgttatacttttagttttttgagacatctccatactgttttcataatggctgtactaatttatattcccaccaaaaagtgtgcaacagctctcttttctccccatcctcatcaatgttatcttttgtcattttgataatagccattctaacaggtgtgaggttttaacgggtgtgagctcactrtgcttttaattcacatttccttgttatattgagcattttttttacatacttgttaactatttgtatgtcttcttttgagatatgtgtatacagtttctttgcctatttttaaatcagggttttgtttttgtttttgtttttttactatcaagttgttttgatttccttatatattttggatattaaccccttatcagatatatggtttgcaaatattattttcacattccgtaagttgtcgtctcttcagtctgttgattgttttcttggctgttcagaagctttttagttctatgtaatcccatttgtctatttttgcttttaagttcatatgcagaaaagtaattgcccagaccaatgtcatggaaattttcccgtgttttcttctagtagttttacaacttcaggtcttacagttaagactttaattcattttgagttgatttttttgtatatgttatgagattattcttctgtataaagctattcagttgttccaacaccatttattgaagagcttatcctttcctaaatgtgtgttcttggttcctttgtagaaagtcaactaactgtaaatgcatgagtttatttctgggctctctattctgttccattggtttgtgtgtcttttttaaaaggccaataccatgtgtttttgattactatagctttgtagtatattttgaagtcaggtagtgtgatgcctccagctttgttcttgcagaagattggtttggttgtttggagtcattaatagttctatacatattttgattgttttatctatttctgtgaaaaatgttattggaattttgataaggattgcattgaatctgtagacttctttgggtaatatggccatttttacaatattaattctggaaattcatgaacacaggatatctttccacttacttgcattttcttccattttttttwatcagtgttttatattttttagtgtacaggtctttcacctccttggtgaaatttgctcctaagttattttattattagttggtgtagctattayaaatgagactgttcccctgatttctttttttggaaagttcattgttagtgtagagaaatactacttatttttgtatgttgattttgtatcctgctgcttcattaaacatgttgaatatattcattctttctaacacttttggatggagtatttatggttttctatgtataagagcatattgtctgcaaacagacagtcaactattttgcaatttagataccttttgtttctttctcttgcctattttctctggctaggatttctggtactatgttgaatagaagtggtaagagtaggcatccttgtcttggtcctgattttggaggaaaaaacttttaacttttcaaagttgagaataatgttagctgtgggcttgtcatatatgacctttattgtgttgaggtacattccttctatacttaatttatggagaggttttttcatgaaaaatatattgaattttgtcaagattttttttggcaggggtggggatagatagaggaattcacagcctctttctaacacccctgagactagataccccaagagatttgctgcttttgtaggaattgtgatcaagacagtttgaaattgcttataaaggccagaatcttcagacattgccggtgagtacaatgccagcagccatttcagaaactactattctcagaagaacctgccaggtccaacataagatttgtgtggattcaagttggagactggggtctctgggcatgcactggggtggtgggggactggctcactgtctatatggttggtaaggtagactggaccattactcattatcagatgccaccaccattagtaaatgtgagcaagagaacactgttctgtttttgagtccagactagacaartaactatggcacaccatttaccaagggtcaatagaatgggaagtagatattcaaaaatgcctaagtcagcttcacatgagggcaatttgtagaaattagtaaggattggatgctgcttctctgctgagcctgcagattccacctatagatgaacttaattggattgaggcaacaaagaaataaaattgattgaccatcaaggaacaggataaaatttgagcctgaggtgctaggacaaataagagaaggaagaagttactcaagtattctccaattcattgaaaattgatgcttaaactgagaccccactgggtgggtataaataggactccctcacagcagcctcatggggactagaaccaccaatatgctaccagtgagacattagcagaattattgtgacttatgacggaataacctagtggctaattttccctccccataattaaggcaaaatcttggagagggaggtgttaaatactacagctttgtgattgttttctaggaattcactcatttcccagctgggcaaataaaaaataaataaaatgggcatgggcacaggtttcatgtgtactccagcccatcggtattaaccttatacattccaagtcagttttcctcatttcctctcataaaaagaaatgattcttttttggtgcaatagataataaaaaacatttgcggagagggctggagatagaaggcacattagagggattgtggagaaagttgtagtgggttagctgagggttaaggggtgggtataggctgaaacatttttaattagtttttctgaggattatataatcacatttacagttttggaaaaatataattttggggggtaatttaaatttttactttgattcaggcattcaaaaatatatttgttaggcactagcttggaatagtaggagagtaaaaggccaacccaccactggttctcaaggaacccaacttgcaggtgcttcgtgtattgtggtgtcctgtgggtttgctgactgtccaaccttatcagtattctgtgatggaacatataggttctgggttcatagcaattatggtagaaatgaaaacaggaacaaaatttgtcttwggtagcgtcaatctcattgttctacacaggcctcctaggttctaggagtatctgtcatcaaaccccttcagatttacccaccttgtattctgctgccttttactgatcttaaaatctgcacactgtgctattggaggtggtttcataacttctcaggatttcgwagtgttttatttgtaaaataatgataccaatctctgaactgtaattcattgtgttgctaagaaagatcaaatgagataacaaatgggaagatgttttggaaagtgtacagggttgtacaaattgaatagaaacagaatggtttacaactctggttgtaaaccctggatagaccttacagtttggagcactttccaaaatgccactccctaggctcctcccctagagatcctgatccagttgatctggggtcctagaattagaatattttaggagcaattctgttgtacaggcagtgttgagcattccgtttaccccttagagagttcattacttcccccatgacaggttttattttttatgtttacattttaggtttcataatgaaatataaagtagggactctatctccttttaaaggaattttagccaccaggaaaatgtttgctaaagcatcttcactggacttttgatacttcccataggttttgccgtgttctcccacccaggagggcaaacgttggaatggtcactgtgttcataaccagaaaaggagtggagcacccagtcgagcatgtggcatgaacggctgatgctgagtattttaaacctcagcattgtaaacagaagtttaatctgttgactggggatttctttatgacccacatgctttgagaatattctggtgactcacttccctcctcaagtccccttctccaagttgcccactccccagcaaacactgctgggtcgtttcctgctttcttgtgtgcatgaagataaaatactcagaaaaattggggaagattttataattgctgtcatgagcagctgcatgttgaaaaaaggtgaactaacttcagcttcttttttttctgtcagaatgtatttagtgtgaattactcatgtgcratacaatatttgataagcttatatatagccagccacatatagatgaaaatttagaattcagtttttaatcatatgacaactagcatcgaatttccagttatttttgctaaacatctgtccaatttatttactagagtacattcatatttacagtttcctttcataaaaacaattctaaaatgattagctatatgcttgtttacccaatgctaaaggcaagtctgaaaatttgcaactgcatttaaagccatcattctaatcactgccaggcattcctataccctatatgygatttttgtgctatttaaaacataatattataataattcttttgaaaaatagaaatagggaccattaagcataggagatcgtgctttattctctctctccctttttgttttttctttctaagatggagtctcgctctgttgcccaggctagagcgcagtggcgtgatctctgcttcctggttcaagggattctcctgcctcagcctcccaggtagctgggattacaggcacacaccaccgtgctcagctaattttttccttttggtagaattggggtttcaccatgttggccaggctggtcttgaacgcctggcctaaagcaatccacccaccttggcctcccaaagtgctgaaattacaggcatgagccaacgcacccagctcatgcttttttcgcttagaaagtcatagaaaggtactttttttctatatatccatgacattgattgtatgctggagaactttcgtttttcagcattcatgtatgtcttgatttaagacaatctgaaacataaagcatcaattaatctaataaacctggaacaagtatttgcattatgaaaatggttcatcacagaggtctttaaaggttagctctgaaattgttaagccgatacattgccattggcatggtaaattgaatctagtgattcatttgtgggaaattatcttaaatttttttgaaaaaagcattacaattatgcacacagatttgctcatcatcatgttacgtaggctttgaaaaaaatagaartggcctaaatacctaacaattgcrcaatagtaaataaatggcattaaatttactggatgaacaattacaaagttttaaagatgaatatttaaaaatattataaattttacactttaaaataagattctaaatttcatgttatgtgtatttagtcacaataaaataatcttataaaatatggaagtaatatttattagcatatattgcagtgtaaattgtggctatgctacaatttatatagaaattataggatatatgtacacagatggaaaatgacaaaagtaattaaaaaatcaaaattgtattatttaaagtggtgagatcatagattttttttctawttagtatttttaacattactttacatcagaacaagctttaccactttgaaaatgtaattaaagatactggctgtctatataaaagatcagggacctatctcaaattgttatccttattagtcctatcatctattcagatgtataaataactcagtacattacatttattttcatagtgcatatttcatgcaagatggtgctgcacataagcagatttacagatatgaacaagaaaaaacactagatatattagtgtttgtgtgggtgagagacagaggtagttattcaatatcccacttgaaaaacaagacaaaaatattcagaaaaaaatgctgctgatgaaactgatgaaaacctgggggctatttttattttctatggacagtaatacctctttataacagtgctgagtactgacaagttcttaataaaacctagacttatcttttaagcactcaaactaaaaagcaaataaacattaaaaatattttgaagggaatctttctgaaatgtattacacactttcctacttttctaaatggtttccaaagaatttaacctgaccttktccatttgacttaatttatggccctgcattgctaagctggtagcatgcttcagtttgtgtgattcttctatctcttcctttgctataaaatcacttatttaacaaatgacacaagtctgtatcgacagaaccaccttctacttccatttgaatttcctatgttcaattttctcagatcagggaaacactataacaagcttccttgagctttgtatattatgtgattaataatgtaagtcatatggctcctctggggagtaaagggcttgaggtttttggaaaggtcttttgatagcctagagttcttgttctaaattctgaatgtacaactgtattctgaaagatcaagcttgcagatgcctggctctcagataagtgttgagtcacagaactaatgttatgttagaagcagaggggaacgccgatgaacaaattatgttttgttaatgtatgatatttttgctctttatattatgacagaggattaaagaatcatgagtagaatggaatagaagaaataatccaaaaagaacaccaggaattggaatatgtttaaagaggcagaaaatggtacatagaataatgacatacaggagagaaagagaaaaaaaattttttttagattagatcttttattatttaatatgtttgaggctttgtccatagcagttgaaatgtgggtttttctgaatgttcagcaatccaactgaaggaaagaattaggagattacataggttccaaaaaatgagaggcagagtctagaaaatgatatcatctctaaataaaactgacacttaaaattttggtattctgaagctattatcagagataacatggaaaacatgtacaaactcaaaatataacaacctcactccctctggcaaaaataaaccccaaaaccaaaacctcttctgcttctaagactctgagtaggaagttgaactaagaggcacacaagtgtaccctttagtgaagagacatgagacagcattgatgtaagagttaagagatctgggttcccagaattacctttctataacatgtacaagtcctgtccccttctctagacctttgtaaaatatcattcgtaaaatgaagaattggaatagaacattgctatgctccttttagagctcaaatagaaagtcatcatctttcaccacttctccctaactttggaagaagttgatcaatatcttcttcttgaagcacttttttttttttacctccatgacacatgctctccttgatttccaaaatttcttttccttagctttgtcaacactttcttttctgacaagcttcaaatattaatcagagttcataagtttcatctctgagacctcttttcttagatactctaaaatcctaggtaaacttatccactctcattttttgatttttttaagttaaaattcagcataataaagaaattacatatagtataatttgtagttttacaaattagagaataattataaagcatatacctaggtaaatacctaggcagtaaaacagttctgtgactcaacacttatctgaaagccagacttctggaagctcaacccttcagaatatagttgtacattcagaatttagaacatggcctctaggctatcaaaaaaaactttccaaaatccttagtaaaaacactggcagtaaaaaacatggtctatactcataagcccctgagattttggggatcatttgtttttgcagcaaatctaatacgtcctcctctaaaatttttactttaaaaacctataggtaagttttatggctatcttgaaaatcacattctttatggctttaatgaaacctattctataatttaccagggattaattttttgttatttttgaatatttgagaaaagttagtttaaaaaatcatgcatgaatgataaattttgttacataatctttgcttattcattatcctattatctgttaatgtagtaaattacattgatttttttgaatgttgaaccaaccatgcatataagcttaacttggtcatgataacttattctgaattcagattattaatacagctgacccttcaacaatatgggtatgaactgcctgggtccaattacatgcagacttttccccatattttgccacccctgagacagcaagaccaaccactcctcttcctcctcctccttggcctactcaatgagaaggtgaagacctttataatatacttccacttaaggaatagtaaatatattttctcttccttatgatattcttaataacattttattttccctagcttactttattgtaggaatacagaatataatacattaacatacaaaacatgtgttgactattcctgttatcaataaggcttctagtcaacagtaggctattagcaatatagcctactgctatactgactctcaggttttctgggagtcaaaagttacagatggattttgaactgcatgggggtacagttcccctaacccctgcattgcccaaggatcagctatacttaagaattttgtgttataaaaaatcagtgatgcaagaatggctacatctctgtggcagctctgacacacttgacatcttattctggcacccagatggaaggatcaattcctatctgggatgttacattgtttggcagaagagtgctggaagaaacttgtgatgccttttaaatcttctgcttagatgtattcaaatgtgttcattaaattcatccgtacaccattggcccaaacaagcccatatataagaaggaagacaatattttcagggaataaaatttatgacagaatacaaattttaaacaatgtaattttaagagcaaaggtaaagaaaaggatcataagcaatacatacaatcttagaagttcatatacagtgcaagttttggtaataaataggaacaatttatgttttaattcaaaggaacaaaaactcaagattttagtgttttggaatcaagatttggagaagtaggatttatacttggaagacgcaaatggaagagtatattttattcaaaacaaatatccaaatatgaagaaaggcacattagaactgcatgttaagaaagtgtatcagatatctattggtgcataacaaattacttggaaacataacagcttaaaacaacaaacgtttattatctcccagattctaggtcaggaacacgggaacagtttagctgagtggatttggctcagggtgtctcatgaygtaataaaagtgttggctgagttgcagctgtctcacgtttgactggaggaggatccacgaccgtgcctccctcacgtggctgttggctggcctcagaggatctgttcaagactcactcatagccgcctccacagggctgcctcatagcctgcagctggctcctcccaaagcaagtggtccaggagagaatgagactgcactcaagaaggaagctrtggtgttttcacaatctaatctcagaagtggcatcccagaatttctgccatactctattcttttgaagcaaagtattcagtccagcctgcaggcagggggaccatgtgactaccaggaggtgaggagcactaagaagtatatatgtttttatgaagatccataactctgtaaatggataaggtaagatgctgaatgacaatcagttgataaaggatgactctcactttttgttttataaatgtgtatcatttgaattttttaaatgatgatattattctgttactaaagaacaaaagtaaatacaaataatgtaaattgccaaagtgatttttaaggtcttccatgatggtgtctgaatattcaggtttatgtcattattaatctatcactatagggcttgataagaatgtgaaagacctgaccttggcccaagatcctgactttctacgggacagtcctgatggatttgtcctgcagagggattgtaataattctgagaagaatgtagactgggctacaggttagctctgtggagttgaattaaggcttccatgacacgggggatgcttccattaggtgaaaacttgccaaaaacttattctaatgatggaggcttttttcaaacatagacacttataagaataatttgggagttttttggctgaaagtgaaagaaaagccaaatccagttgggttttacagaagggaaatgtgttggctcaaaaaacatttcagaggctgatgttcaggggctgtttgattcatagttccacaatatcatcagggttctgattctttatcttaataggtttttcaactgtgcactcctctgtgtgttgattattcctcatgtttgcaaaagtggcagcatcaaatctagaaattccagggttaatgtccttacatcagcaaatccaacaaaaagaaataaagtgtttttatacattaacagtaaaaaatattgtttgctctgactgggctaggccatgtgtctatttctgattggatcatcgcgttgaggtggtggtatgttcaaactggctttagctcatcagagttcaatcataaagctgatttaagaggtcgatttaaagggggtgrattttatcccaaacccaagtctgagatggtgtaaatgagttatgttccaaaataaatttagactaatattaccagcgaatatgagaacttgatattgggcatcaaataaaaaaaattattactttatagggacacagcaattctccacaccaatcggaatggctgttattaaaatgtcaaaaaataacagatgctggctaggttgcagagaaaaagggatgcttatacactgttgggagtgtaaattagtgcatccactgtggaaaacagtgtggcaattcctcaaagacctaaaatcagaattaccattcaactcagaaatttcattactggatatatactcaaaggaatataaatcattctatcataaacgattacaatatgtaatgaacagtatgtttattgcaacactattcacaatagcaaacacatggaatcaacctaaatgtccatcaatggcagcatggatacagaaaatgtagtacatatacaccatgaaatactatgtagccataaaaaagaatgagatcatgtcctttgcagggatatggatggagctggaggctattttccttagcaaactaacacaggaacagaaaaccagtaccacatgttctcacttataaggggaaactaaatgatgagaacaatggaaatacagaggggaacaagagacactggggcctatcagagggtggcggggtgggagaagggagaggatcaggaaaaataacwaatgggtactaggcttaatacctgggtgatgaagtaatttgtacaacaaactcttgtgacagaagttgagctatataacaaacctgcacacgtacctctgaacttaaaagttaaaaaaagaatttattttaaaggattgtttttgcttaaattttataacttggtagcccaattcaagcaaaagtaaatagaaatattaacacttatgtaacacttatgtaaaaattacatcggcatttagtacttgaaagatataaacttagaggcttaaaatgtttgtttggctagttccaagagtatttttatttttccttttttaaaaaatttctttaagggttatgactatttctccagtttttccagttatacccttttctgtgtgttgactattcttagcctggcttctctcatagaggcaagtattatagcagcactaatgaactaagaaaatatgagaacaatgtctcaccaaatagagaatattaataaaaatataggcattataaaaatagaactaaaaggaaattctggatttaaaagtatactgaaataacctgataatttcactagaggatctaagcagcatatttgaagaggcataaggaagaatcagtgaacttgaagataaatctgttgagattacctggtctgaggacaggttaaaaatgaagaaacatgaacagagcttaagagacctatagaacacaatcaaacatagcatattatgcatattgagagttctagaagaagagacagattgaggccattttcaataatggataacaattagacattagatcggcaaagaagtaggtgatttgaacaatgctataaagaaactagaccaaaaagacacctatagaacattccatccagtaacaatggaatatacattttattttttctcaattatatttggaacatccttccaaaataccatgttaggtcacaaaacaaactcaataaatttaaaaacactgaaataatacagagtatattttctaataacaatggaataaaattagaagtcaaaaacagaaggaaattttwaaaattcaaaaatgtgtggaaattaatatactcttaacaaatgggaaaagaagaaaccacagggaaatagataatactttgagataaacaaaataaaaatacaacatgcccaaacctatgagaagcaacaaaagcagtgcttagagggaaatttatatctgtaaacatctacatttaaaaaataaggtcttgtcagtaacctaaacttccaccttaagaaacttgaaaaaaagggaaaatgaaactcaaagcaaatagaaggaaaataacagtaaagattaaataaatgaaacagagattagaaaacaatagaatcaataaaaacaaacttggttaaaataacatcttccttttacttaaaatataaagacacagtttaattaaaattaaaatatatgtcatggaagtactaatgataagaaaagtagagagaatatattaatatcaggcaaatagttttcaagaaaagggttattataagagaaaggggacattttctacttataamtcatcagtttattaagaagacacaacaacctttttttgttcatgcagactrttagaacaaaatctaatagacatggtggcttatttatttctcacctttctggaggctgagaagttatccatgatcactggtagatttggtgcctggcaaggacccactttctggttcagagatggtgacttctcattgtgttcacacatggtagaagagatgaagcagctctctggggcttcttttataaagatactaatcacctcccaggagccccactttctaataccagcacctgggtgagcaggtttaaccatatgaattttgggaaaacataatcattcagaccatagcacagtcctaaataagaatgaaccaaacaacaatgttcaaaatatataaagcaacagtttacaaaactaaaaagataactaggcaaatttataaatataaagattttagccatcattccattattgatacaataagtaaacaaacaaaaaagcaaaatcaaagtctagagaacatgaacaattatcaaccaggttggtatcattaacattcatggaacactaaacctcaacacagcagaatatacgttctctttaagtgcacattaagtagttgctaagattggtcataaaacaagtctcaacaaatccaaagaattaaaaattcgagtttataaaaactttaaacttcttattcatattaaaacaaataggcaagctacatactgggaagaaatatttgcaccatttatatcttgctaagaacctgtatctagacaatataatatactcctaaaactcagtaataagaaaaagaatccaatttttaaaaagcaaaaagtttgaatagacacttctaaaggatggacagtaaacacatgaaaaagagctcaccatcattagtaatcagggatatacaaatgasatatcccacggagtagtgtaaaacaaaaggactgaaaaaaaagaaaaagaagaaagaaaaaagaaaacaaaaaaaagactgacaatctcaagcattgatgaggatgtggggcaatcagaactctcaagcagtgctaayaggaatataaaatggtataaccaatttaaaaatctctggaaatgtcttataaaattaaactcctaccgccactctgacccaaccctcctaatcccaattatccaacagaaataataatttttttaaacgtctaaaaacacttgtacaggcctggcatggtggctcaagcctgtaatcccagcactttgggaggccgaggagggtggatcatgakgtcaggagatcgagaccatcctggccaacatgaagaaacaatgtctttactaaaaatacaaaaattagctgggcgtggtggcgggtgcctgtaatcccagctacttgggaggctgaggcaggagaattgcttgaaccagacagtcggagtttgcagtgagccgagattgcgccactgcactccagccaggcagcagagcgagactccgtctcaaaaaaaaaaaaaaaaaaaatttgtacaacgtgttcacagcagttctgttcataaaacccccaagctagaaacaatccaaataccaaatacttacctgtaggagaatgaataaacatgagatactgctcagtgtgaagaagaacaaattaataatacaaaaggggcccgcacaggtaggggtgaggaataagtgacgtggcagagattgactttgtagggattcaagacaacttctagagcaacaaatattctgtatcttaatagctttgtgggttatatgggtgagtgcaatttgtcaaaattaatataactgcactctgaaaatctctacttatcactataaataataaaaagagaaatccttcttggaacaagataggtacaaataaatgtcaacttatctttttttgcctacctacatatagttttctctcacttttaaggttaaaccagaggcaaagttaaaaattaaaaactcttgctaagggaaaatagtaatattaagcaagtagacaaataccttagaaattcaaccataacatggtgttgcttttgagctcctatagttttatactgcagtgatggaagttagagtttattcaatatagttcatgtttcaaaaatgcatggttattgaagagacactttatcattccctaacacctgcagaggttcataacccactccatttgtatctttaaagttcktggtggataagcagaaatgrggaatatttaaaagttctttgacttctcacctgctgaccctaagtgtaaggagaatctttaatcaagtaaactgtaattctttggggataatattttatatattttatgctaatgttgaggtggtttctgattcttttaaatgaatgctgacattctgaattgatcttcaatattctatgagaaattaattattgataaaacttttcttattaaagtctaaggttttcattctggcaagataatttcttggtggagacagccgactgcctttcccatactgataccaggcagttactctcccttttaaaactttcagtaaagtgtgaataaaaccaccttgtttgatattttcaatacaactgagatagcatatattttgcaaaaatattgtattaatagttatctaatatcagagacaaaatatcagaatataaaatatgaaaataggcaatgaagtcctattattactagttttttccctacattttgtcttatgggaaagagagaattttttttttcaccaartgccttgcagattttttctagcattctctctgggtatgtacttctcaatccctggttgacaaatttgtgaggatcagtgatacagtgaaatcagaaaaacctgctgtgaattatggctgtgctatgttatcacagacctaaaaataaaagctaaaattttaagacttytaaaagaaaacatgtgctaatatctttgcaacctagggtaggcaaagatgtattaggagagttttttttttttttttccttttaaaacatagacatggaagacatttacattcatctcccattctgcatataaacatgacttctgatacaaggaatcactgttttggcttggaaattcagctcctctccactcttattcatgtgattggcgtggagccctgctcacaaggagtggtggtggacatgtggaacagatctaagccaataaaggtgtcccattcctctgtccatcttgatttgttcaggaatgggcaggtgacctaaaccaagccaatcagagtagatctctctttacatagaatttccagaacaggaggtattatgtaaagactctgcctcttcttaattgggtttgactgggtttgcaagtcctgtaagctctgacaggcattttccaatcatgaggaaagagccctttgattacagatgcagcatagaggaagtggagttaagagacagaatgaatgaaattagatattggatgacattgttttagcctttgtttccagctgggcctgatgtcagatgkagccttggactagtcagtggctggaaacaatgtattccattttttgcttgaggctacattgaattggatttttctatgcaactgaaagtatctgcactaatattatctatgacacagaattactaagatgtactcttgtaagaatatctagaaatcattttgtgatatggctatgtagtaaaatgggggaaagttagcattttaatcctttatcacttattggctgtgttatcttttatttttaatttatcaagaatttactccctttcaggcactgtgagggtaattttagacattttatcaaatttcttccttccaacaatccaataaagtagttatctttaactcatttcacaaataagggacccagggttcagagaagttatacaacattcctctcataacataaaaggtaaatatcacaggcaggatttgaatccctgtgtgtattactccaaatatgtgctattggttatcacttaatatctttcagtagttttcatctgtaaattgcaaacaataatatttcccactattaatatattacagccttattgtagggcgaaaccatgcaagtactttataaactacaaatgactgtgtcattttcgctattgtattattttactttctaagatacaaggtctcaaggtctcactctgtcatctagactggagtgcagtgccatgatcatggctcattgccgcctcaaactcctggctcaagcaatcctcccacctcagccttctgagtagctgggactacaggtgcatatccccatgcccaggtagctatttattttttattttttgtaagatgaggtcttgccactttccccagactgttcttgagctcctgacctcaaggaatcctcctgccttagcttcttaaagtgttggaattataggtgtgagccactgcacccagccatgttcacatttattaagccagatttaaatatagtgattaacaagattgtttccatcctatatgtgtagttcattgatatttgagccccaggaagatgtctataaaagccattgttaatataaatttataatttttgacaattgctacattcatttttcacttttgacctgctgacctatagatcctcaccgtattcctttgaagtaaagagcacaaaagtttaactagctttttaaaagcatactaactttcatggttcccatttctcatgcaaggaatcaggggagagggaagggtgggaagagagtgggagtcaatacttgcagagaaaaatacaggccattttagtggaaggggagaccaaccataaaagatggggagctgaaaaaaaatgtgtgattgaacgagtagtctagctgttctcaactctgactagaccataaagttatctatggatctttttaaaaaatacatataactgggttgcactcttcatcaatgaaatcagatttcatggctggggcacatggtattttctttaaagctccacaggtgatttcaatgtgcagctaggcttgatggcccctaggataaagcaggaaaaagtgacacttttctttacgtagttgtatatattttttacgtgttttaataattaatttacctattaataaacttactaatgtgcatttattcactcattcatccttttaaacagtgaatcaattatccacctattcacccgtttattcagccactcatttatttgttcacttattcatccacttacttggctagccagtgacctagtcaacccatgcatatttattgagtgcctaagctctgtgcttctagagatataaaagtgaacatgacagatgaggtcattgcttcataaaactaccagttggttatggcagtgtttctcagagtgagtgtaacagtgctaagaaacattacttctttggcttatgaaaagatattttgagaaacatttgcttatggactaattctgaagttatggaaacttttgctttaatgttatttgcatggaattgtaatatctctgtatcactgacacatttaaggatactggaaattctaatttaaaattcgctgaagtgagatgatgactgatggaaataaataatgctgaattaccacttccctcccactttataccaaataaagttcaccttaatatcttcagctgaaagataaaagagaatgattataagtagctttggttcaattcttagttccttttctgtttgcagatatttctaatcttcattaaaaggcacatttatatatcttttaacccattcaattaaaacttctctaacctcccacctcatcaaattgagccaaatctggagttgataggctctgttttagctgctacttatttgtactgattcactgagccttaatatagctcatgttaacagagtccatggttactgttttgagtgagaacaggatataagtactacatgttcctggacatcaatacaagcttgatctttcttagttgctaaatcccagaattgttaaagatgttttactctgagggaatagtgtacattttaaagtggttgtctttactttttaaaaaactatttgtcaaatgtcatcacaaatgaacaatgtccagattgtaccaattttatacactcttaaatttttaaaacttcccactttcatgtgtaatttcctggaacaggagcttcccaactgagttgctagaaatgtccttgataggtgctgtggccttgacagcttaagttctttagaattattttggcttactttgccttcatgaaatctgtagtttttaaatgtaagtatttgttaaataattttcagtgtaagcataatataagcacatattaagtttcttccaatggcaaaaaaatcatacaaaaaagtaaaaatctatcaccttcatttttccactaccaatcccattccataaaaagttaactactgttgtttcttaagaacatctagagattttatatgtaaataatattgtagcctagattcccccaaaaaggttaagaaagaaagagataatttatctaaccagtatctacctccatttgatcaaaagtttacacaacaaactgtaactcccctaaacttcccagtggagcatacatgggtgctgggcagtgactgttggggaagcctcagggcagtacatgcaaagtgtttggtagggatatgaagtaaaataatgtcaaattaagcctcatcctccatgaaagcttttgcattttccactgcccagtgagaaatgcaaaaggtttcatgaggaaaaagagtcaagtgagtctaagagtctgaagtggtacatagagatgtttaacatattttgtrtgtaaagttgtgtgtgtgtgtgtgtgtgtgtgtgtaaatttaagtacggaaaaactatgaatttttttttcaacttttgttttaggttcaggggatacatgtgaaggtttgttactttggtacattgagtgatgctaaggtttggattacaaatggccgaggtactgggcatagtatctaatgttttttcaaccctccccacctctccactctagtagtccccagtttctactgttgccaactttgtgtccatgagtacccattgtttagctcccacttaaaagtgagaacatgaagtatttggttttctgtttctgccttaatttccttaggataatggcctccagctgaatccatgttgctgcaaagggcatgattttgttcttttgtatggctatgtagtattccgtggcatatatgtatcatgttttctttatccattccatcactgatggaaacctagatagattmcatgtctttcgttattgtgaataatgctttgacaaacatgtgagtacatgtttcttattggtagaatgatttatttatttattatactttaagttctgggatatatgtgcagaatgtgcaggtatgttacataggtatacatgtgctatggtggtttgctgcatccatcaacccgttatctacattaggtatttctgctaatgctatccctccccttgctccccacccactgacaggccctagttgtgatgttctcctccctgtgcccatatgttttcattgttcaactcccacttatgagtgagaacatgcagtgtttggttttctgttcctatgttagtttgctgagaatgatggtttccagcttctatgtttctgcaaaggacatgaactccttcttttttatggctgcatagtattccattgtgtatatgtgccacattttctttatccagtctatcactgatgggcatctgggttggttccaagtctttgctattgtgaatagtgcttcaataaacatacgtgtgcatgtgtctttatagtagaatgatttgtaatcctttgggtatataygcagtaatgggattgctgggtcaaatggtatttctggttctagatccttaaggagtcgccacactgtcttccacaatagttgaactaatttatactcccgccaacagtgtaaaagcactctatttctccacatcctctccagcatgtgttgtttcctgacttcttaatgattgccactctaactggcatgagatgatatctcattgtggttttgatttgcatttctctaatgaccagtgatgatgagctttttttcatgttttttggcctcataaatgtctccttttgaagtgtccattcatatccttcacccactttttgatagggtttttttttcttgtaaatttgtttaagttcttagtagattccaaatattagccctttgtcagatgaatagattgcaaaatttttctcccattctgtaggttgcctgttcactctgatgataatttcttttgctgtgcagaagctcttcagtttaattagatcccatttgtcagttttggcttttgttgtcattgcttttggtgttttagtcatgaagtctttgcccatgcctgtgtcctgaatggtattgcctaggttttcttctagggtttttatggcttaggttttacatttaagtcttcaatccatcttgagttaattattgtataaggtgtaaggaaggggtccagtttcaattttctgcatatggctaggcagtttttccaacaccatttattaaatgggaaatcctttccccattgcttgtttttgtcaggtttgtcaaacatcagatggttgtagatgtgtggtcttatttctgaggactctgttctgttccattggtctatacatctattttggtaacagtactatgctgttttggttactgtaaccttgtagtatattttaaagtcaggtagcatgatgcctccagctttgttctttttgcttaggattgtcttggctatacagtctcttttttggttccatatgaaatttaaagtagtttttttctaattcagtgaagaaagtcaatggtagcttgatgaaaatagcactgaatttataaattactttgggcagtatggccattttcacaatattgattcttcttatccatgagcatggaataatgtttttccatttgcttatgtcctctctaacttccttgagcattgctttgtagttctccttgaagaagtccttcacattcccttgtaagttgtattcctaggtattttrttatctttgtagcaattgtgaatgtgagttcactcatgatttggttctctgcttgtctattattggtgtataggaatgcttgtgatttttgcacactgattttgtatcctgagactttgctgaagttgcttatcagctaaaggagatttcgggctgagacaacagggttttctaaatatacaatcatgtaatatgcaaacagacacaatttgatttcctctcttccttgtgaataccctctatttctttctcttgcctgattgccctggccagaacttccaatactatgttgaataggagtggtgagatagggcatccttcgtcttttgccggtgcttctggcctttggccattcagtatgatattggctgtgggtttgtcataaatagctcttattattttgagatatgtcccattaatacctactttattgagtgtttttagcatgaagtggtgttgaattttatcgaaggccttttctgcatctattgagataatcatgtggtttttgtcattggttctgtttatgtgatggattatgtttattgatttgcatatgttgaagcagccttgcaatccaggaataaagccaacttgattgtggtggataagctttttgatgtgctgctggattcagtttgccagtcttttatggaagatttttgcaaaaatgttcatcagggatattggcctgaattttctttttttgttgtgtctccaccaggttttgttataaggatgatgctgctctcatacaatgatttaggaagaagtccttctttttctattgtttggaatactttaagaaggaatggtaccagctcctcttagtacctctggcagaatttggctgtgaatccctctggacctgggttttttttttttttttttttttttttttggttgggaggctatttaaggcctcaatttcagaacttgttattgctctattaagggatttgacttcttccttgtttagtcttgggaggtgtatgtgtccaggaatttatccatttcttctagattttctagtttatgtgcactgagatgtttataatattctttgatggtagtttgtatttctgtgagatcagtggtgatatccactttatcatttttattgtgtctgtttgattcttctctcttttcttctttattcatttgactagcagtctgtctattttgttaacattttcaaaaaaacagctcctggattcattgattttttgaaatgctttttgtgtgtctgtctccttcagttctgctctgatcttagctatttcttgatttctgctagcttttgrattcgtttgcacttgcttttgtggttcttttagttgtgatgcttgggtgttgattttagctctttcccactttctcctgtgggcatttagtgctataaatttccctgtaaacactgctttagctatgtcccagagattctggtatgttgtgtctttgttctcattggtttcaaagaacttatttatttctgccttaattttgttatttacccmgtagtcattcaggaggaggttgttcagtttccatttagttgtgtggttttgagtgagtttcttaatcctgagttctaatttgattgccctgtggtctgagagactgtttgttatgatttctgttctattgcatttgctgaggagtgttttayttccaataatgtggttaattttagaataagtgttatgtggtgcggagaagaatgtatattctgttgatttggggtggagagttctgtagatgtctattaggttgggttggtgcggagctgagttcaagtcctgaatatccttgttaattttctgtctccttgatctgtctaatatctcccactattattgtgtgggagtctaagtctctttgtaggtctccaagaacttgctttatgaatctgagtgctcctgtactgggtgcatatatatttaggatagttagttcttcttgttgcattgatgygtttaccattatgtaatgcccttctttgtcttttcggatctttgttggtttaaagtttgtttkatcagagactagtattgcaactttggcctttttttttttttttcgctttccatttgctcggtaaataatcctccatccctttattttgagcctatgtgtgtctttgcacatgagatgggtctcctgaacacaacacacgatggttcctgactgtttatccaatttgccagtctatgtcttttaattggagcatttagcccatttacatttgaggttaatatcgttatgtgtgaatttgatcctgtcattatgatgctagctggttattttacccattagttgatgcagtttcttcatagtgtcgatggtctttacattttggtatgtttttgcagyggctggtaccagtttttcctttacatatttagtgcttccttcaggagctcttgtaaggcaggcctggtggtaacaaaatccctcagcatttgcttgtctgtaaaggattttatttttcctttgcttatgagcttagtttggctggatatgaaaatctgggttgaaaattcttttctttaagaatgttgaggccaggtgcagtgcctcacacctgtaatcccaacactttgggaggccaaggccggtggatcatgaggtcaggagtttgagaccagcctgacaaacatggtgaaaccctgtctctactaaaaatacgaaaattagctgggtgtggtggcatgcgcctgtaattgcagctactcaggaggctgaggcaggagaatcgcttgaacccaggaggcagaggttgcagtgagccgagatagggccactgcactccagcctgggtgatggagcgagactctgtctcaaaaaatwaaaaaaaaaataaataaataaaagttgaatattggccctcactctcttttgacttacagggtttctgcagagagatctgctgttagtctgatgggcttccctctgtgggtaaccctattcttctctctggctgcccttaacgtttttgccttcatttcagccatggtgaatctgacaattatgtgtcttggggttgctcttctcaaggagtatctttgtggtgttctctgtatttcccaaatttgaatgttggcctatcttgctgggttgaggaagttcttctggataatatgctgaagagtgttttccaacttggttccattcttcccaggtacaccagtgaaacgtaggtttggtcttttcacatagtttcataatttttggagactttgttcattccttttcattcttttttctctaatcttgtcctcacactttatttcataaagttgatcttcagtctctgatatcctttcttctgcttgattgatttggctattgatacttgtgtatgcttcatgaagttctcatgctgtgtttttcagctccattagatcatttatattcttctctaaactggttattcyagttagcagttcctgtaaccttgtatcaaggttcttagcttccttgcattgtgttagaacatgttcctttagctcggaggagtttgttattacccaccttctgaagcctacttctgtcaattcgtcaaactcattctctgtccagttttcttcccttgctggctaggagttgtgatcctttggagaagaagagacattctgatttttgaaattttcagcctttttgcactgtttttttctcatcttcatggatttatctaccattggtctttgatgttagtgaccttcagatggtttttgtgtgagggtcctttttgttgatgttgatgctactgctttctgtttgttagttttttggttttttttctcatagtcaggtccctcttctgcaggctgctggagtttgctggaggtccactccagaccctgtttgcctgggtatcaccagcagaggctgcagaacagcaaagattgctgcctgctccttcctctggaagcttcatccctgaggggcagttgccagatgccagccagaggtctcctttatgaggtgtctctcaaccccttctgggaggtgtctttcagtcaggaggcatgggggtcagggacccacctgaggaggcagtctgtcccttagcagacctgcagtgctgtgctgggagatccattgctctcttcagagcctgcaggcagaaatatttaagtctgctgaagctgtacccacagctaccccttmccccaagtgctctgtcccagggagatgggagttttatctataagcccctgactggggctgctgcctttctttcagagatgccctgcccagagaggagaaatatagagaggcagtctggctacagtggctttgccatgccttggtgggttctgcagacagttcgaacttcccggtggctttgtttacattgtgaggggaaacccgtctactcaagcctcagtaatggtggacgcccctccccataccaagctcaagcgtcccaggtcaacttcagactgctgtgctggcagcgagaatggcaagctggtggatcttagcatgttgggctccataggggtgggctccgctcagcaagaccactcggctccctagcttcagccccctttccaatggagtgaatggttctgtcttgctggcatttcaggtgccactggggtacagaaaaaaaactcttgcagctatctcggtgtctgcccaaacagctgttcagttttgtgcttgaaaaccagggctctgttggtataggcacccgagggaatctccttgtctgcgagttgcaaagaccgtgggaaaagcgtagtatctgggctggatagcttcatccctcacagtgtggtccctcaagcttcccttggtgaggggagggagttcccagacctcttgtgctccctgggtgaagtgctccccacctgctcctgcttgccttccatgggctgcacccgctttctaaccagtcccaatgagatgaaccgggtacctcagctggaaatgcagaaatcacccaccttctgcattggtcttgctgggagctgcagacgggagctgttcctattctgccatcttgccagcctccccaatttgttttcttatagctgtatactgagtaatgagattgctgagttgaatagtagttctaagttctttgagaaattgccaaactgctttccacagtagttgaactaatttacattcttatcaacagtgtataagaattcccttttctccacagctttgctggtatctattgctttttgactttcttatcatagccagtctgactggtataagatggtatctcattttggttttgatttgcatttctctgatgattactgatgctgracattttttcatatgtctgttggccacttgtgtgccttcttttgagaaatgtctgttcatgtcttttgayygtttttaattatgggcatttggtttttatttgttcaattgtttaakatccttataggctctggatattatacccttgttgatacatagtttgtgaatatttccttccattttgtaggatgtctgtttactctgttgatagttkatattgctgtgaagaagctctttagtttaataaggccccatttgtcaatttttgtttttgttgcaattgcttttgaggacttagtcataaattccttcccaaggtcaacgtccagaatggcgtttcctgggttttcttttaagattcttacagtttgaggtcttacgtatgaatgtttaatttatcttgagataatttttctatatagtgaaaggcagcagtccagtttcattcttctgcatatggctagctagctatcccagcaccatttattgaatagaaagtcctttccccactgcttacttttattgctttgtgaaagttcagatggttgtaggtgtgaagctttaattctattttctctattctgtcccaatcatctatgagtctgtttttgtaccagccaactgccatttttggttactgtagccttatagtatagtttgaagtcaggtaatgtgatgtctctggctttgttctttttgcttaggattgctttggctatttgggctcttttttggttccatatgagttttagaatagctttttctagttctgtgaaaaatgatgttggtagtttgataggaatagcattgaatctgtagatttcattgggcagtatggccattttcatgatattaattcttccaatcaaatatcctccatttgtttgtgtcatctctgatttcttttagcagtgttttgtagttctccttgtaaagatctatcacctcctaggttagatgtattcctagatattttattttttgtgtgtctgttttaaatgggattgcattcttattttgactctaagcttgaacattattaatatatagaaatggtactgatttttgtacattgattttttttttttatcctgcaactttctttatcgaagttgtttatcaatcccaagagcctttcagtggagtctttgggggttttctaggtatagaatcatatcattcacagcgagagattgtttgacatcttcatttcccattcgtatgccttttatttgtttctcttaactgaatgctctgcctagcccttccagtactatgttggatagcagtagtgacagtgggcattcttgtcttcttccagttctcaagggaatgctttcaacttttgcctattaagtatgatgttggctgtgggtttgtcatagatggctcttattattttgagatatgttccttcaatgactagtttgttgagggtttttatcatgcaggaatattcaattatattgaaagctttttccatgtttatggagatgataatatggctttggtttttaactctatgtgtggaatgacatttaytgatttgcatatattgaaccaactttgcaccccagaagtgaagcctacatgatcatgttgaaataacttttcaaattgctgttaaattcagtttgctaatattttgttgaagatttttgtgtctatgttcatcagggatattggcctatgtttttttttttcatcatgtytttgccaagttttggtatcagagtaatgctctaataattctactaggtgtacagtaattctactaggtgtacagctcctccttgtacacctagtagaattcacctgtgagttcatctggtctggggattttcttgattggtaggtgtattagtcagggttctctagagggacagaactaataggatggagatatatatataaagtattaacttacatgatcacaaggttccacaatagactgtctgcaggctgaggagcaaggagaaccagtccgagccccaaaagtgaagaacttggggtccaatgttcgagggcaggaagcatccagcacaggagaaagatgtagtccgggatgctaggccagtctttccttttcacgtttttttttgcctgctttatatttgctggcagctgattagattgtgctcaccagattaagggtggatctgccttccccagcccattgtctcaaatgttaatctcttttggcaacaccctcacagacatacccaagatcaatactttgtatgcttcaatctaatcaaattgacactcagtattaaacatcacagtaggttttttattactgattcaatttcaggactcaatattgacctgttttgtatttcagtttcttcctgtttcaatcttgggagattgtgtgtttccaggaatttatctatttactctaaatttttatagtttgtgtgcatagaagtgctcataatagtctctgagaaggtttcgtatttctgtgtttctgtgggtttggttgtaatgtcacttgtgccattactgcttgtgtttgtttggattttctgtctgtttttttcttgttaatcttgttagagatctattgatcttgtttgtcctttaattttttgttgcgttgattctttgtttgaaactttggatttcaatttcattcatttctgctctgattttagttatttcttttcttctgctagctttggggttagcttgttcttgtttttctaggtcctctagatgtgatgttagatggctaaaataagatctaacttttcaaggtagacctttagcattataaactttcctctcaacactgatttttctgtatcccagatattgtgatatgctgtataattgttttcacttatttcaaagaattttttgatttctagctaatttttttcctcaaaagtcattcaggaacaagttgtttaatttctgtgtaattgcttgtttatgggrttattcttgatattgatttctattttcattccaccgtggcctgagagtattgtttttttttttttttcttttctttccctttccctcttagggtgtgcaacaattgggaatgctgagcaaggctttgccyctatatccctatgcacttctgttggaaggtaagatgtggtggctcaggctgctgatccaggtgagctggtgctctgagatctaraaatctgcctgggcatggagtggagagggctttgttgcacaatgatctatatccagtaagagtggggcacctcaggctgctgaacccaatgcatgggtgctcagaatgtctggagayctgctttagggtgaagcaaagacagccccaatgtaccatgatcacaggggaacaggctgagacaaccgtcaatggcacatgcagactggttccaggtcactaaattggctctagttgtctcattgcctaggagacactgcagctatagcagttgtcttcccaccccaggcttgtaatagggaagagcacaattcctgcctctagtgctaagacgctttccacagttagggctatggaggtccctaccctgctccagagctggtgctccagtccctgtccagagattaaaatgcctgcatggccatgctggcrgattgccacagaatggccgactgtatgcacctaccataaaaataattttcttctctcagtcctggattgggaaaaatatctgaagctttacccagtgtttttccctcacagaatgttcaagcctcttcccaagacagctccagtgtttggggaaaataaagtgctctcccttggcctgggcycttggatcccaagtggaaaggtgagtcacggagggaggtgctcttcctctctcatgtactaggactttactcatttttgtagccagatgccatcacaagggccgtttgctggcattctcattttttggatcaatggtgtccttcacaattctgtgaaggaaatttccattttccttcttgatttaaagttcacagagttggtctttatgcactatcttgctatttccaagtggttgaggcaggctaaaagcctctaatctaccatcttgaaaaaaaactgtcttatcaagttttaaactcatgatctgtgccgttacataactcctagaagatgagatattttccacatcacaaaaatttcctactatccatattggttgccagaaacattataaccaagcttaagaaagttactcatagccaaataatttcaaaagcaaaaatatgaaaagtcttcaaatatttgtaccgcaaaaattatatttattattgtatgtagatgctttttaacgcatttattctactatgtgaggcatctccaaaataattgtgttaaactactgagtttaattttgaatcctcaaatagccttgtatttttattgctttcctgaaccctaggatgaacacagcttttccttgagtcttttctttggaaacagtcattttaaaggactcagatataatcttaaaagacagctattggttagaagaaaaaacatagctaatatgcatgtacacacatatacatacattaaatagttataacacagtgtttcaggaaaagtggcagaaacttgaaagatctgatatactgaagacattaacaaaaaaagaaatgagaaaagtaggccttgatgacctcaagtaaacctatgtgacttatagggataataattttcattggattgaatggaaaaatacaatgggcaatattgagatgtctgcagtctcaatttagagaagctctgatatttgttggtatagatcattgtgtcaaaggcaagaaaaatattcatttaatgagaatctatcagtctaggaatagaggctgtgctcccaatgaaggtttatatatagtacaactgacttattccacttgaaccagtaaagttgggtcagcagaagctttctttagttatctctgaaattgataaaagaaagctaactaaagttaagggcttttacttattgattgcttctactgcagcattcaccctgtataaacaaaatgataaagattttttttttttaattttggcaaaccactcatgtctgaactgaaatggaaatcttagaaccaaaccgaaattttaggtgttttttcagaatttagttgcctttaagatatgaattatttctttatgttctatcactgtgaattatggatgaagtaacttgacatgttataaaaatgtgatagtctgtctgaaatattttgattacatatttttctgaagtctttttcttcttttttctttaaatacagtgttcatttctcatagtctcccatgcttgaggactatcctctgaatagttaagcttgctctgagcatgacaagtgatatggtttggctgtgtccccacccaaatctcaacttaaattgtatctcccagaattctgacatgttttgggagggacccagggagagataattgaatcatgggggccagtctttcccatgctattctagtgatagtgaataagtctcatgagatctgatgggtttatcaggggtttccgcttttgcttcttcctcattttttcttgctgctgctatgtaagaagtgtcttttgcctcccaccatgattctgaggcttccccagccacatggaactgtaagtccaattaaacctccttttcttcccagtctccagttgtctttatcagcagcatgaaaatggactaatacagtaagttggtatcagtagagtggggcattgttgaatagatacctgaaaatgtagaagcagcttaggaactggataacaggcagagattggaacagtttgaagagctcaaaaaagacaggaaaacatgggaaagtttgaaactttctacagacttgttgaatggcttcgcccaaaattctatggtgatatggacaataaaatccaagctgaggtgatctcagatggagatgaggaacttgttgggaactggagcaaaggtgactcttgttatgttttagcaaagagactggcggcattttgcccctgccctagagatttgatcttgagagagatgatttaggatatctggtggaagaaatttctaagcagcaaagcattcaagaggtgacttgtatgctgttaaaggcattcagttttataaaggaagcaaagcataaaactttggaaaaattgcagtctgactatgcaatagagaagaaaatcccattttctggggagaaattcaagccggctgcagaaatttgcataagtagcaaggagcctaatgttaatctccaagaccatggggaaaatgtctcagggcatatcagagaacttcacagcagcccctcccatcacggacctggaggcccaggagaaaaaagtggttttgtgggctgggcccagggtccctgtgctgtatgcagcctagggacttggtrccctgtgtcccagctgtgccagctgtggctgaaaggggccaatgtagagcttgggctatggcttcagagagtggaagccccaagccttggcatcttccatatggtcttgagcctgcagatggacagacatcaagaattgaggtttgggaacatccacctagatttcagaagatgtatgataatgcctggatgcccaggcaaaagtttgctgcaggggcgggatgctcctggggaacctctgctaggacagtgcagaagggaaatgtggggtatgatcctccacacagagtccttattggggcactgcctagtggagctgtgggaagagggccatcgtcctccagaccccaaaatggtagatctaccaacagcttgcactttgcacctggaaaagctgcagatgctcaatgttagcccatgaaagcagccaggagggaggctgtaccctgcaaagccacagggrcgtagctgcccaagaccatggaaacccacctcttgcatcagcatgacctggatgtgagacctggagttgaatgagatcattttggagctttaaaatttgactgcccccttggattttggacttgcatgggccctgtaacccctttgttttggacaatttctcccatttggaacttctgtatttacctaatatctgtactcttattgtatctaggaagtaactagcttgcttttgattttacaggctcctagacagaagagacttgccttgtctcaaatgagactttggactgtggacttttgagttaatgctgaaatgagttaagactttgggggaccattgggaaggcatgattggttttaaaaatgcgaraacatgagatttggaggggctaggggtagaatgaaatggtttggctgtgtccccatccaaatctcagcttgaattgtgtctcccagaattcccatgtattgtgggagggacccagggggaggcaattgaataaggccagactttcccgtgctattcttgtgatagcaattaagtctcatgagatctgatgggtttatcaggggtttccacttttgtttctttctcatttttttcttgccaccatgtaagaagtgccgtttgcctcctaccatgattctgaggcctccccagccatgtggaactgtaagtgcaattaaacctctttttmtttccagtcttgggtatgtctttatcagcagcgtgaaaaatggactaatacagcaagtatttgaaatatgtggataggaataagaatttttgattgagacaaggtaggcttatttgagatatcataatttacaaatagcctaagaaacagaatttcttgaaatttatagtttacttagaatcagtgggaatcttaagaactagcaaatctaccattgctcattcttttccagctgcctactcctgtactaaacattttttaaaattgctttgggaaaagtaaatttcctttcctttcactaatgatcataataaataatatttggtgtaaagcagaaaaatcagtaagacagaaaatgcaaggaaaaaattatgtaaaatctataacactcagaatctgttaaatacaggatatttaagaattgacaataatcctcatcctactgttttttatttctcagcaagtgcaatgaatgttggcattgtttctcagactttggtatgacagtaaactataaaagtatttatttgacactaattataattaaggcatagtgagataatcaattgatgcagtctataattccctattcttaattttacaaaataaaaattcacagcgatgggagacctggtccagccctgtccattgtgacccacacctcctcaggactgagcagaaagagctgctgcaatgtaagttgatctaacctagttggaaagcaatttattaataatagtcagagacctcaaatatggatgttctttgggattctaatctaataaaataattaaagtagtctaaataatacaaaatacagataaacttcatgcataatattaataatggctgaccattataaagtacttattattatagaacagcaactgtgatatttcaaatggatcataccgtataatcattatcaaaacaattctgacatatttactatttcttcctatgatctcagtactttgggaggatcacttcaggtcaggagttcaagaccaccctgggcaatttattgaggcccccatctctacaaacaataaaaaaaattagccagtcatggtggcaaacagtggtagtcctagctactctggaggatgaggagggaggatcaactgagcccagaagattgaggctgcagtgagctatgatcctgttactgcactccagcctaggtgacagagcaagaccctgtttctaaacatatatgaaaaaacaaaaatataaaaatataaattaaaagataaaacaaaaataaaacagtaaaatttattaattgatgattatacaactaataagtgataaaactgggattaaaacttagtaggtggaaattcagaattcacacatttttcgcattttgaaatttttttaaaagtctgcaattattttaattttaattgacaattagaaatgatatatacttmtggtgtacaatatgatgttttgatataaacrgacattgtggaatagctaaatcaggctacttaacatatgcattacctcacatatttataatttttttgtggttggaagaacacttgaaatctactctcttagcaattttcaagtttatgatatattgttattaactacagtcaccacaatgtacaatagagctcttgaacttatttctcttgtgtaattgaaatgttttgtcctttgaccaacatctccttaatcctgcccctcgcccttggcctctggtaattatcattttattttactctctgtttctataagttgactttcctagattccacaaataagtaaaatgatgcgatatctgtctttctgtgcctggcttattttgcttaacataatgtcttccaagttcatccacgtgaactccaaatgacagaatttcattttttaaggctggatactattccactctgtatatataccacattttctttattcatctgttgatggacacttaggttgattccgtatcttggctgtgttgaataatgctgtaataagcatgagaatgcagatatgtcttggacatactgatttcagatcctttggatatatatccagtaatgggattggtgggttgygtagttctagttttaatgttttgaagaacttccaacctgttttccacaatggctgtgctaatttacattcccatcagcagtgtacaagggttcccttttcttcacattcttgccaacacttatcatttacctttttgataatagccgttctaacaaaatgagacratatctcaatgtggttttaatctgaatttacctgatgattactgatgctggccttttttcttataattgttggccatttgtgtgtcttctttggagaaatatctattcatgtctgctaatttttaaattgagttatttgttttcttactattgaattgcttgagttacttaaatattttggatattaactgtgtgtcagatgtgtggtttacaaatatattctcctattctgtaagttgtctttttactccgttgattgttttcattgctgtatagaggtgttttagtttaatgcaatccatttgtttatttttgtgttagttgcctatgcttttgaggtaatatccaaaaaattcattgcctaactcaatgtcaagaagctttttgcctgtgtggttttatagtttcaggtcttatggttaagtctttaatccatttttagttattttttaatacattgtaaaataagggtctaattttattttttgcacgtaaatatccagcttttccagtaccagttattgaagagactattctttccccattttatgttcttgtatccttgtgaaagatctgttaaccataaatgtgtatatttatttctgggctctttgttccgtttcattgttctatatgcctgtttttatgcctgtaacacactgtctttattattgtagctttataatataatttgaaagaggatgtatggtgtctgcagctttgttcttcctgcttaagattgctttagctattttgggtcctttgtagttttatacaaattttaggatttttttctgtatctgtgaaaaaggtcattgcgatttggtagggattgcttttggtagaaattactttgggtagtataaacatttttacaatattaattcttctaatccatgaacacaaggtgtctttctatttatttgtatcttcttcattttctttttttctgattcacaagccttttgtatctttatttatttatttatttagcctaatttctctggataggacttctagtactatattaaatagaagtggtgagagttggccgggcaaggtggctcacgcctgtaatcccagcactttgggaggctgaggtaggtggatcacaaggtcaggagttcgaggccagcctggccaacatgatgaaaccccttctttaccaaaagtacaaaaattagctgagtgcattggtgtgtgcctgtaatcccagctactcaggaggccgaggcaggagaattgcttgaacccaggaggcagagattgcagtgagccgagattgcaccaacgcactccagcctgggcaacagagcaagactccatctcagaaaaaaaaaaaagtggtgagagttggcatactagttttgtccctgaacttagaggaaaagttttcagattttaccattgaatatgaacattgagatctagtttgttgagagtttttatcacaggaagatgttaaattttttcaaatgctttttaactttgacatctattagccaatttccctgaattcaatgtactttttaggagaggcagcatgatagagaacactggatctcaaagtgtggttcccartcagcaacatcagcatcatccaggtatgactagttagaaatgcaaattcttgggttctagcccagacctactgaatcgtaagctctgaggtctgattcagaaatctgtgtcttaataagccctctatgtgactgtcatgcatgctaaaatttaagaaccaccagtttagtaaaggaagaaaaattttattgaaattacctgagtttaatcacattccacacccaactttgtaaatttgtgcaaattatttaatcttccatttctttctttacaaagttaaggataataataagtattgcatgggttttctataaagattatataatatttgctaggagtagtgagtgcttaataaatgggagttattgccataggatggttcattctgaaaggtctagctaacagcccttcacaaatgcctaatatgccttactcacatctcataagacacttcagtggctaatatattatgccaaattgggattcaaaaataatggctttctaatttggaaatggtgtccctgatacaattagctctttgcaactagagaatctattatagtctgtttgttaagtactaagcaaattctccttcttacagcatatcaatgattagccttgctagcttttgcgtatggtgcaaattaggcacttaaagtgcataagccgttctcagggaaatccacaaagtggtaagtgataaacaaaattgaacgctctcaataaagaatacctgggttttgtcagcattaccagtaggaaaaactgcacagaatactcaccttctaattggcccctctgttagaaaacaaatctcttgcctactgtgctataatactgacaggaaaaaggtaaaaaatataattgttatggaaagggccacttccttggcaggcttaccaggctattatattttttaggagctgaactttccccagggtattaattacccaaaatgaccacctggaggctgggtggggtggtggggagcactttgttcagggtctcaggttgcagggctctgtgataaaaacaccctcaccatctgtgataaccaccagcagccagcagcagccaggtaatgagatcaaatcattccccttaaactttaacctgtctgggtaagacaaaggctcagcaaagaggatatgtcattaaatttaatttagacttctggagtttagacttttgtttttatcaataaaataaatgtttaaacctaaagccatttgcaggagcagacacagtgaagctttgacttattgcctctagataatgctaggttcttgccagtgcatacattcctaataaaagcaaggcacatgaaaatggcgactgttgtctatttaaaatatctcttctggtctgtgtccagtgatcttacacatataagcttaacttttttggatgtttacaattttttttgagtttgtgaataatattataattatgttgagcctgaattataggtttgcatttgctaagcagaagacactgtctgcactaaatgactttttaaagagtttcctaatgagcagtggtgttcaatatgttgggagctgtgagcaccacatgaatcaaagtgctagctattaaaataggtcttcttaattaaatggaattatattttctttaaaggagctatttgactttatcaaacacattacaatttgactttatcaaacacgttacaaagatatgggggatgagtcagactcattacaggtggtaaagaaatgactggagttgaaattaaagtttccaattttctccctcctcttcctgctcctcttccctccatcttctgatttagttgcttttaaactgacagcattatagatgtctcatcttcatgctcacmctggtttttgcttaaggtcttagtgtgcctctgtcatttttgatttcacaaataacgcaggtcactccattaccttgaacttgcacatcaccattacacatagaagactgtaaatattttaaacatgatttcttggtaatttgtggtttaataactatgaaaattagccttacacatgtgtcaaggaaaaggcaaaagagggaaagacyaaataaaaagagaaccaataagaaaggcaagtaaaatctacatgctatgtagtctatgatcacataactccatgaaaagtttccttccaaaatgtgtaacgtttgtcactacaatatttgttgaatataagtgatgaatgactgaatgactttaggtcttgttagactacttagttgcctgctggtgcaccataactatgaytacaggaaaaatggccatgcrtgattataaggcatccaaataagacccattatgttgtgagctagtgcttttctgtattaccatatatctaccaagatgagatacagtcagagaggtgaggtttataaaacattcttaactaaaatattattgaacaatggaagaaggtgataaaaattaatagctattatgttatttaaaaattactatgttttttaaaatcaagaagagttttatctcagtgttctgcatactaaccaacttaccatgcacattagataaatcctaaataataatttgttataaatcttcaagaagttatttttctgcttataaaaaatatgtttattgttaaaaacttagaaaatagataaaataaaaagtaaaaaatacttagaattccacacataaaaatagcctctaacagattggatatttagctcattcttgcataacatttccatatttttaaaataatggacatcacatttcctctggggagccttcctatcctgcttatcctgactaggccagcttcctctcccatgatatccatattttccccacttacttaactcatcttattataaaatctatttaaaggtttgtccacccctcccaataagatttctaagtgaaatctaagaaatcatgtctcattcctctttgtatccctaacactaaacaccctgcatctacaaaattaaacctaggattgttaaaagaacaatgtataagttagttcaaatataattctctatccaacctttttcacttaacatatataaaagtattatcttatgtcattatatttcctcagaactccccctgcttttcctgaggcacagtattccatcatatgtctatactataatttctttttttttccctgaaacatttgagagtaatttgccaacatgatgcccatcactcccaaatattttagtatttatttctctcaaaaggatattttccaacataatcataatcaaaaatttatagatacattactaccctcattagagtatagatacatattgtagattagacaagttccaccatttgtctcaataatgtcctttgtaaaagcgaaaggatgtcagtcagaagcacacactgaattcacttgtcattccctcttagtcttcagtcttcccataacattcatgatcttgaaagttttgaagaatacagaccagtaattttggagaatgttcttcagtttatgtttgtctaatgtttcctcacaaatagattcaggttatgtatttctggcaggaatatcacagaagtgatgctggggttgttgttgttgctgttgttgtttttttgagacggagcctcattctgtcaccaggctggtgtgcagtggcgtgattatataagcattccccagctttttttgtgattatagaaagcaatgtgttactgcaaagaacacagtacagtagaaaagttataattatacaggatggataagctatgaagatcaaatgtacagcatgtgactatagataataatagtgtattatatacttgaaatttgctaagagagtatatcttaagtgttcttaccatacacaaaacatggtaacagtatgaggtgatggatatattaattagctcaattgtgatagtcatttcactatgtatgcatgtatcaaagcatcaagttatacacattaaatgtatacaatttgaatttctcaagcatatctcaataacgctggagaagaaaaatgatacttgtatttcaagaccttaaaaatctaaaagagagatatgtgtttacaattagtaggcagaacacagaaatataacaaaagtaaaatcaatacatctgaaagcatcaaactaggagatatgaatttcaataagacattaatttgacttcagggaaaataatttctgaatattacgtttattcttctttatctcaaatgtgttctagggcaaagtcctttcattctgtttttcttgcttttttcacactaggtattttttatgagcttcatgtataaattgagattatgaaatagttgattccatcttctgactattgtagtctagcaacagtgggaatgagaatgaaaaaggagtcaactttagttgcatgttgagtttgcctgtagagtatccttaaggggcagctgaccaagaagcagggagaacctagaactccaggaaccagttggttgccctgattttgctgcaggagaatgtcttgcctgagggtctggtttattctgaatgcctctgaagagaataatgtgttctcctgaggggcaaaggagaattttgttttaaataaggaaatactcaggatgagatagagtatgaaatgacttctgagattcagtagggggcatacttagacttaccagattaattccacaccctgcccccaacccccacgtgccctcccatttcttttcttttcttttcctttcttttcctttctttctttctttctttctttctttctttctttctttctttctttctttctttctttctttctttctttctttctctttctctctttctgtctttccttccttccttccttccttccttccttccttccttccttccttccttctttctctctttctctctttctttctctctttctttcctttctgacagggttttgccttgtggcccaggctggagtgcagcggcacaatcacagctcactgcagtttcgacttcctgggctcaggtgattctgtcacctcagcctcctgagtagctgggactacaggcatgcgccatgaagcccagctaatttgtttgtttgtttgtatgtttgttttttgagacggagtcttgctctgtcgcccaggctggagtgcagtggcgcgatctcggctcactgcaacctccacctccccaagccaggctaatttttttattttaattttaattttttgtagagatgggttttgccatgttgcccagcttggtcttgaactccgaagctccagcgatttgctctcgcagcctcccaaagtgctgagattacagcatgaatcataatgcccagcctcctacaaaactttaaagttaacactttgcttttctacatggaaattaccaaatcttctatagccttctttttctttatcctctcctccactgttcattttctctgtacaaattgcttttagagactagttacagtacaggctggaacaccttccttggtgtcttctaatcatagataatggagtggtcattgtaaccaagggctgcactgacagtcctttgaggtcgaataccctaaatccatagactgtgccaaaagttctctccatgtggatgttttcaacattttataatttattttttttaatgaaagattctcttggtttttctttacatgccaaggccttacctgaaaacatgcattttaatttggtatgtttaactttgagaaattatsatccaaagtgttcttaatatagaccctggatttcctgagatacacwaaattacaagtttcttctctgttgtctacataagtatatgaaatcaaagcatgttcttatttatttcataacttttgaaatgaataataaatgttttcagtcctctacagtgtaccaggttctatgttaaaccgtttatatgcattttttaaaaattgaattcccattgtaattctatatcataggtgtcattataattcccattttccagatgagggaactgaggcttataaatatttcataatttgtayaagatcataccaatagggctggctacataatttgtgggaccacgtgcaagataaaaaccgtggacccccttgctcaaaaatcagaacaaaagcttttccttttctttatcagtgtctttctctcaagttgtcatagcggttttatttgctgttgaatattgtcctggcttgggcataaggatactcaagtgatacatgtatactctaacaggtgcccagaacctagagccctgccctgaagcttattgcattgggcataaaagcccaacctggccttagcctgcccaagcttctccaggggcagaagatagcagtggtcacaaggcagggataggagggaaaacctaggtgagatgtgggtggcagaggaagagggatcaggcagctgagaatcagttctagggatgtgtggagattgtgggaggtaggactatacctgcactgaggctccaagtctttggtgcacatgccattgtcttatcagacttcacttaagtcacaaatccaaagataagtttataatgaatttcaagacagcaactgtaagacattaaaacccaaacacaggawcctcttctgagctgtgccttcagaggagttcgtttaaaaaaactgaagttgatgaaattacataaagccatataccatgaaggcatatagcacttgagtactaacaacagagtttggaatccatcacagttaggtaggatgccaaagcctagtatactagaagtcatggtaatttagtagaggaaataggagtcatacatgttcattaggtatcaaaaactacttagtgaaaagaaggcttttactaagacaggaagaatcatatggtctratgctgggtggaaagtctagcacccacctttwaggcaatctatgctatttcagggttttactcttagtaatcattatgctttcaatcaaatgattttgcctgcatattattatctatgtgaaagcatgtaaaatgagtagtgttaatgcatcatttttattgctttaaaaaaggttycctttttggtgacctggaaactttcctgcctagcttgttaattaggtttttctgaagcagtgctcagtcttgaccatgtgattcttggtcacagacagtggccaccctagagtgtaatggtcaacctccctgagaatttggagaggggggtgtcctctgtttggagtggaggctgactcctagctgcagcttactttgcttttataatttaataacaaatttccctattatgcctgtgttcaaatttcatctgaagaaagaaaagcaaatccaccaccagacgtgcacgtttcccaatacccttaataaaacatattgcacagtgtggagtgacattttaaaagaacagacctttcagcagcttgtctctatgccattgtgcataactaaagcctgctaggtcacaaagggagatgcagggaagtggattaatatgtaaaccaacctaggcaccttcagatgatgaattctaaggtatactttgtgaattcatttcattttgagagcagttgtgcccagaaattaatttgtattcataaagcttccccattttctctttagataatgacaagctttgttcttcttgaaaagtttgtttttaacaatgtggcacattaattctgtaagataaatatttctaaccaaaggatggtatagaaaattgttgatagaaaataatatattttggaaaaacatatagaatgtcccagttctcacatagtgcctgccttagaaatgcaatggatggagtctgtgtgttttgagatttttaaagaaactcattaaaattcatatatgtaaagcttattttaacaaaatagacataaaaggactcttaatttctgaacgaatcactacagctaaaagcattgggatttaattgttgcccggtccccagcacacggcagtcttccacatcaggtgagagccagcatcacagagcttaggggatttgagcttgcctctgaggacagggatctgagagtctgasgtccttttgaagcttccattgtgtattgctccaataaatgtattatagttctttccagagaatgacaaaacattatcttaaaactacaagtttttcaggccaccattacagacagtggcttaactatgataagtacatttcaagctcctatgtcttagattccacctaatggactgtcaggaaaaagatggagcttcatgggtcaagcatttatcagttgttgacttcctaacagtagctcatcccttcttaagaatattacttcagagcaagtgtgaaaaaaaacaaaaaacaaaaaaaaccctaagctctgtgaaccgtgcattttcttttgaaaactctgaataaagatgcctccaattagtcagggaggataaaggatgcatttgattacatgatgggcatgcaagctttgttgatgcaatcactcaactttatcatttttttctatcctacagtgcctggtgttattaagacaatatgtctacagatttcaaaataatccattgactagaaaaatttgcatcactatggcttcaatagacaaagtattcaagacagtgcttggaattagtagctttcatttatcctgcctacaggaagaggaagacaagttttaaatgacagctcttaaagatggtggcggagtcccaggaatgatgttgagaatcaggctgcatttctgagaaagcactcagagctctttgctcttgtatactgccaatgtggaatcacttctaaatttgccttaatccaactcctaggaaaaggaagttttacctgccacaatgctccacacaaagaaaaccgagtaagtcttgtcaaagaagtactcggtggatgcagggcgtttctctttttgccagcttccttggctcaaatcccatgcaaaccatctcccttcagcactagagggaggtgattaaccatagaatccaattaaaaaaaagaactaaaaatccctaattcttcttttgaatgataagagatttggacaaaacatttaactgaaaaacaattatctcaaaaaatttaaatcctagttgcttcatgagcactctagcactgggccgaacctcctttctgtactgttgaactgaccttctcttccctgcctcactcttaccgaggtatagtccttcctctcgcttctttggtgattagctcatgtaatctaggagtggctgwatcatacttattttattctaattgttgtccaacttttccattattaccacgcatttctttgagaatcaaaaaagtttattttaaaaataaatggaaaggatgatcaaaattagaagatacgtaaaatcagtgttggaagctttctttcttgtaccagaattgcatacctcacaattcatcttttcagaaacgtgttagtaagtactttttatagmtgcatgcatcatagtatcattcgattttatttatgcatggtctgtttctttctttcttttttttttttttttgagacggagttgcgttctgttgccgaggctggagtgcagtggtatgatcttggctcattgcaacctctgtctcccgggttcaagcgattctcctacctcaacctccctagtagctgggactacaggcatccgccaccatatctggctggtttttgtatttctagtagagacagggttttaccatgttggccaggctggtctcgaactcctgacttcaggtgatccacccgcctcagcttcccaaagtgctgggattacagatgtgagccaccacacctggttatgcattgtcaagtytctaattaatattacctcaaccatggtggagctggttggcgtgaggaagtatatccaacaaaaatggtgcaagcctcaatgtacatgaacaatagggttgatgttaatgatgacgatgccacccaagttaagaacaaatgacctattcatatagctcactttttaagttcctatttacattctgaagcagaacgagaaaaaactctgatttaattttcctaatatcaaggaaaaagatagtcctatggcaaaaagtactgctccaattttgtaatcttctgttaaaaattaacagaaaaataaatatttctgatgatttgtaggttttaaggaggatagactttattctcttaagaaaaatttcccagaaaaactaagtaagctctatctaatggtagtgtatctataatcttagaatgaggaaatagaaaacattctgaataaatttaaaatggttagttggtgtgtgcaactttacttactagagctacttgaactaagtagcaygtatgttttytactctcattttttagttaatttgtctaggaaacaagtgattatgaactatacaataacgaggctaaagttgcatctgaattttctattaggctattttctagagcagctttatgtcctcagcaaaattgggcagaatgcatagagatttccattataccccctgccctagaacatgcatagcctctcccagataaacgttcccaagcagagtaatatatttgttataactgatgaacctacgttgacacatcatcaccaaccagaatccatagtttacgttagttcactcttggtgttgtacagcctatggatttggacaaatgtctaatgacacaaatccattcttttagaatcatagagagttgttttactgccctaaaagtcctctgtgttctgcctatttatctttctctccccaacccttgacaacyactatcttttcattgtctccaaagcattacctttcaagaatatcagatagttggatcacacagtatgtagcgtttttcacattggccttgttcacttagtaatatacattkaagtttcctccctgtcttttcatggcttrataggtcattcctttttagtgctgaataatattccattatctggatgtaccacagtttatccattcacctactgaaggatatcttggttgtctcttaagtttgggcaatyataaataaagctgtcataaatatcatgtgcaagtttttgtgtggacatcagttttcaacttctttcagtaaatactaaggagtgtgattactgcatcatatgataagagtatgtttagttttgtaagaagctgccaaactgtcttttaaggcagctgtaacactttgcattcctaccagcaaagaatgagagttcctgttgttccacatcctcagcaatatttgtttgtattagcgttctgcattatggctattctaataggtatataatatctcattactgtttttatttgcatttccctggtgacatataatgtaaggcatctcttgatatgcttatttgccatctgtatatcttcttaagtgaggtgcctgttaaggtctttagcttatttttaaattgagttgtttgttttcttattgttgagttttaaaagttctttgtatattttggataacacttctttatcagttatgtcttttccaaatattttcttccagtttgcctctttttattcttttgaccatgtcttttacacagcagaaaatcttaaatttaataaagctcagtctcttaatcctttctctcatggattatgtcttcagtgttattctaagaataattgtcatcaccaatcccaaagtcgtttaggttttcttrtgtgttatcttctaggagtttgatagtttttcattttacatttagttctgtgatccttttgagttaatttttgtaaaggttataaggtctgcatctagaatcatatatttgcatgtaaatgttccgttgttccagcaccatttgttgaaaatgctatattctcttcattgtattgcctttactctgtcaaagacctgttgactatatttacaacagtctatttctgagctctttattctgttccattgatctttttgtcggctctttcatcagtactacactgttttaatggctatagctttgtagtacgtcttgaagttggagaatgtcaatctgccaactttgttcttctctttcaatattgtgttggctatcctgaatcttttgcctctgtctataaactatagaatcagtttgttgatatccacaaaataacttgctgggattttgattgggatgtattgattctatagatcaacttaggaagaactgacatcttgacattattgagtctttctatacatgatccataaatggaatatctctccatttatttagtagttctttgggttctttcatcaatgttttgtggtttttctcatatagatcatattcatatttcattagatttctacttaagttttcatgttttggggatgctaatgtaaatgtttttttatttcaaatttcacttgttcattactggcatataggaaagtgattgggttttacacactagtcttgcattctgcaaccttgctataatctcttattagtttcaaagtattttttgtcaactctttcatatttcctacatagacagtcatgtcatttgtgaacaaacacaatttaatttcctcctttataatctatttcccttttgttttcttttttgtcttattgtattagctggacttccaatacaatgctgaaaaggagtggtgagatgacacatgtttgccttattcctaatcttagtggtaaagctttgagtttttcactcttaagcatggtgttagctgtaggtttttttgtagatattcctttaacaagttgaagaatttctcctctactcctaatttactgggagtttttgtcatgaatgggtgttcgttttcatcaaatgtttttctgcatccattgataggatcatgtgatattttttctgtaccctttgatgtaaagaattacactaattgattttcaaatgttgaacaagtcttacatacctggaataattgctacttagttgtggtatgtaattcttttgatatatctttggatttgatttgttagtcattttattttcttgtaatgtctttgccaagctttgatagtagggtaatgcctgcctgacagaatgggttatagagtattccttcagcttataatttctggaaaatgtagtagaaaattggtgtcatttatttcttacattttgttagaattatcagcaaactcatctgggcctggtactttctgttttggaaggctattagtgattgattcaatttatttaacaaatataggcctattcagagtgtctattgctttttgtgtgagttttggcagattgtgtctgtcaagaaattgattccatttaatcaattttttaatgcaacagataaaaaaataagccctagacatttctgtatcttatggtttcagaaacagtttgactatcattcctgaagtgccagagtttgagcaaacatcacataagtggtaagttctcaaagaagtggagatctttttccctttatactcactataatgacctgtctttaatgctggaccgtcttactagggtggaaaaatgttaaactgatttattgttatgccagcagaaaactgcccttttaattcatagtaaaacatttttctgtgtcctaataactgactgaagggagggattcagtgaatgaagggaagaaaatatgcacacactaagataacaacaaggctctaaaacgtagtagtacacaaatatgccaagtatgtgggaaactttataagggatgctacatgaccataactgataaggaagaaaayaagagtcagtagttatgagtcactctgggtaaggttggcagacacagagcttgtttaccatctccctgccccaggaaaatcagaccaacccagcattttttggtccagtcccattctactcctgtgtgtaaacccagttaatcactaagaggtcaaccacttcagtttgtattttttaataaaaggcctatttttcttccctatatcattctccttaaggattaaacctgacatttcaagatgccaaaaggttgttatcctaacgcattgatgcatccttttgccaagttgcctgggttaatgctcataataaaggccaatgtttcaatcattgcaacaggagtaaagagaactgtttagccagttattttctgaactgaaatgttcaaatatattggatttctcaattcccaatctagggcatcaaatcaagtgcattctctagagaagaataaactgacagctccctctcatccagctcagaacaaaatatcacgttattcaatagagtaaaagaaaactttaatgattttttcgtgaggagtgtgagaacaggctaataatttagctaaatttgtcagtaaatctggacaaagcttatattgcaaatgttttctttcttaacattaaatcaaaagtctagaagaaagaatatgaatattataagcatgtaatatatattacatttttacaaagagatgttatgaataaatgtatgctatatttctgactccgatcatatttctgtattccctcattctgtattagatgccctcccataattaatctctgtatatgtctgtcaaagaacattgtaatcagtatttactatttcttttggtagaacacaaatgcttagaacatagatatttcagttgtttctgtttgtgaacccagcccatggcatagtgtcttatataaagtgataattataaaatagataaatatatgaatatgaaaacaatggatcaaaagtgtgatggttttgtaatatcattcctgatttcagtttcatccagttactaagaatttggccttcttaatcaaacagcatgtaaacctgaaacattccttaactctcggccctgggtgatttactggtcctctttaagtgttagtttcttgatatgcagtgtgagagcaattataatgcctacaaggttttcatgaggatcaaatgaggggactcatccagagttttcaaaagactgtgtgactcataataagtgctcagtaaatgttataaaacgcatatttttttcaaaattaaaagtcaattatcacacttcttagaaatcatggcttggcccttatatgagaatgtaaaagaattagaatatgaatgagctttggagttaagatacctggctttgaattccactttttagcagccggaaggggtcttaggcgtctctaagtatttcacagaataaggatattcaaattaattcatgtttgttgtgagaattaaatggaataatacttgcaaagtacctaaagaagtgtagtaacacaatatatgattcactttccatttagtagactcaataagtagataaagttagctttgcaatgcagaaattatatatcagtcaccccaaagaaattcagaaaaagtagatttgatgaccatggataataaaaaatttccattgatatgtagtaacgctgagagtaatgattaaaacttgacattgttaaaggtcagaactcttctccctacttgttcaggtggtttgatctttctggaaaagtctttgaatgggatagaaaggtcagttttatgtcaatgtagtaagccttggggcatcaggactgtgtctggtaactatctttcaaagtgcctctcttagtgagggatacactagaagaaaatccatacaaaattgttcatcaatgactggccaatttttgttctatctcctagtgctgcagaaatgagagagtgcacaacgtgccaaatgtactaacattctaaaagcaggtaaaagtttatagtgttatagctcagtctagctttcttcctgtaaaatacatttaaaattaatgtatgaatcaattccctagataaaaatagacttgttgagagcctgtgtatggggtgcgctatcattcctcgaattgtatacatagaggacagagagacaaagaaatagagatctggaaattttcttcttcctcttttttttttttttttttttttttttgagacggagtcttgctctgtygcccaggctggagtgcagtggtgtgatctcggctcactgcacgctctgcctgccaggttcaccccattctcctgcctcagcctcccgagtagctgggactacaggcacctgccaccacgcccagctaacttttgttttgttttttgtatttttagtagaaatgggktttcaccgtgttarccaggatggtctcgatctcctgatctckcratccacctgccttggcctcccaaagtgctgggattacaggcgtgagccaccgtgcccgacagagatctggaaattttcaattaatttgattattgtagatagtaaatacttctttttctgtataggtatatctctgctgtgttagaatttgatgcatgcaacaatagataaaagtttaattgtatactttctgttttatcttgactcagaattgggaacacatttaatgaaaaaaatcattcagacttcagcacyatacctcagcaagtaatttgagtaaaaactgaatactgaaggtgtttatttcaacttgattattctttattacattgcrttactgttttatactgattaaaatgytgactttctatgttaataaaagattatattaaattttttgattttccaaaattggcaagatggaaatatttacaagaagttctacttgcctgtgtactaagtaatggaatataagatttcaaaattaagatgaccaaaagcaatttggggccataaactgttctggtgtttgtttttcttgagacaattgtaaagcttgcctagaaacttttaagatacctctatataaatattgaaataagggtatggaagtggrgtcttcagctgtacatagtcactccaagcctaattctccatcctcactcaggtttattaccctgacccttatttgtgctaacagttatcaaaaaagacattgtatatttgtaagcgtattcattaaattgatgcatttgaaaggaacaaattttaattctaaatatctgttttttgtagtaattttaatgggaatacatcttagccacagcactaatttacatcattttatactctcatgttaaatccctataatgtaatgtcactgtatatcctcccaagaggcatttagggacatatagctagttcatgatggaactacatactcatatgatcaaacagagatgttaaggattcatatgaaccgagaaatgaggttttcacatatgaaagcaaatttacccatgtgcttgcagttctgcaggctacttaaaagtgctgtgcaaaagccttttaaatataactcttgattcccattgcatctttgcatttcatcatatcccaaaatatactgctacctaaagtctagtgttaggaacatgcactatgatgagatgtttgaaaaataacataattaaaatataaatccagtatgtatgtctttatcaactttaaatatctccaaatttacctggatgtaatagcaacataaaagttttagatgcctaaggacgtcactagcagaaggtaatgtagaaccaaaattatcactccaccacttagagtaacaattgcagacatccacagggaagaaacctgatagtgaacttcacaaaagctaaggactaaggttacctcccagataattggtacctgatgggaggcacctgcaccaatgaagaattttgtatgctagtgagacttttatattttccccttttattcttactaacctgtttgaaaaatagctgrtatggatatttttttcctgaggtaggtcctagtggtttgaaagaaactatctctaattaggccagagcaattcatgtagaaataatataaaatgaattcctttaaaatgtttaattatgaagtattataaatatatataaaactatataggacatatccatgtgccagtaatccatatttacctgatgtttctttatatctaatttttaaaaactgaaacattcagatataaataaatcactcctcccgattttcccctccctccctttgtttctcaccagaggttatcactatcttgtagctggtaggacacatcatcaggcatgtctctatactttttaaaacataggcatgagatcataaataatacaaaaaaatattttggatgctttcctattttatacaaatggtatattatacaaatcctttcacaacctgctaatttcactgaagattgtttttatgatttatctattttaatgcatgtaaattagttcattcattttaatttatgtatagtattccattatatgaaaaaacacttgatttctttattgatggtaattatcaatgatttttacaaaatgataaatgcattcttttktacatgtaagaaatactgaagtttatatcgaactggaattgccagatcaaagggtatatgcttttgcaactttaatgaatatagccaattgctctccagcgttattttattttaccaaatcatactcccatttacagtggataagaactcttgttaattcatatactaagcaacaccttttaatttttgtcaaagtgatttatatttcatggaaactagtaataataagaatctttttatttaaatttttattaaagtgaaatatcaacacaaaattgagtaaaacaggaaaaacagtcagacttcaagtttgcaactttcttttaaaatccattggatgcagcacaaacaattggctgaaaatataaagagagacggtgcctacagagagagtgaagatgtgagcactcacctgagctggacacaatgggacaccaaaatccagctttcagcaaaaaaaaaaaaaaaaaaaaaaaaaaaaaaaaagtgacatatgagaaggcaggaagtaacacaataagatgagcaaggattaattagaataaaactcagatatgacacagatgttgaaagtatttgacagggaatttaaaataattacaattcatatattaaagatgctaatggaaaaatgtggacaacatgcaagatcatatgggtaatctcagcaaaaaggtagaaactataaaaatgagtccaattgaaatacgagaaatgaaaaatatgagacagaaatgaagaattccttcaaaagcctcgttataggttcaccctggaggaaagaagcatcagtgaatttgcagcaaggacaatagcggtggggccaagatgatcagctagaagcagcagtgataggaggctcccatccaaaagaaccaaaacagtgggcgaatcctgcactggcaactgaggtatccaagtttctgttatcaggactgactaggcagctggcatgacccacagagaaggaagagcagtggggtatgacagcccacctgagagccacatggggcaggggagcccccaacccccagccaagggaggtggtgagtgagcgtgctacccagcctgggaagccctgctttgtccatggaactgtgcaaccgacagactggaagatcccactagtgagcccatactactggggcctggggtccaaaccacagagccacgcagattctcaacagccactcagctggaatctgcttaagctgatgtctaagccatctgaactccttgggggaggggyggcagccaacactgggactgttagcttcctaacacactaagatcccagagcaggggaagggcagcagccatctctatagctctgggctgcacttttcccctgctggagccagggaggctggacagcttgatcccaagtggtattccccacagcccaacacaccagctgtggcagactgcagccagagtgcctcttcaggcctgacccttacccatccctcctcaccaggtggggcctccctgtagtaactccaacaactccagccaggggctcagggacagaattttgatctccctgaacctgagcccctagggggaggggtggccataagctccgtggaccagcagacttagtctttctaaggagtctagttctgaggaatctgggcagcccagatgagtgggattccccccagcatggcacacctcctccaccaagggacagccaaaatgtactgttaaatggcttttgctccctttgccacccaactgggtaagaccgtccaacagggattgtcagacaccctatacaggagcactcctactggcatcagattggtgcccctcaaggtcagagatcccagtggatggagcaggcacccatttttgatgttctccagcctcttcgagtgacatatccaggcacaggattgaagcagatgaatagggcctgaagtgaacccccagcaaaccacagcagccctgcaaaagagggacctgaccattgaaagaaaaacaaacaaacaggaatcaacaaaaaatgtccccacaaaaaccacatccgagggtcagcagcctcagagattgaaactaggcaaactcatgaagataagaaagaatcaatgaaaaaacgctgaaacctaaaaggccagagtgcctcttctcctccaaatgatcacaacacctctccagcgagggcacagaactatacagaggatgagatraatgaattgacagaagtacgcttcagaaggtgggtaataaataacaaattctgttgagctaaaggagcatggtctaacccaatgcaaagaaggtaagaaccttgataaaaggttacaggagctgctaactagaataaccagcttagaggggaacaaaaatgacctaatggagctgaaaaacacagsatgagaacctcataaagcatacacaattaccaatagccaaatcaatcaagcagaagaaaaaatatcagagtttgaataccatcttactaaaataatacaggcagacaagattttagaaaaaaagaatgaaaaggaacaaacaaaacctctgagaaatatgggactatgtaaaaagaccaaacctatgattgattggagtamctgaaagagaaggagagaaaggaaccaagttggaaaacatacttcaggatactatccaggaaaacttccccagcctagcaaggcaggccaatattcaagttcaggaaatacagagaacaccactaggatactccacaagatcaaccccaagacacataatcgtcagattgtccaaggttggaatgaaggagaaagtactaagggcagccagagagaaaggccaggtaacctagaaagggaagcccatcagactaacagcagatctctcagtagaaaccgtacaagccagaagagagtgggggccaatattcaacaatcttaaagaaaagaattttcaactcagaattttatatcccgtcaaactaagctttgtaagcaaaggagaaataaaatccttttcagacaagcaaatataggggattttgtcaccaccaggcctgcctggcaagagctcctgaaggaagcactaaatatggaaaggaaaaaccagtaccagccactgcaaaaacacaccaaaataaaaagaccaatgacactatgacactacgaagaaactgcatcaactagtggacaaaataaccagctagcatcatgatgacaggatcaaattcacacctatcaatattaaccttaaatgtaaattgtctaaatgcccctattaaagacacagatgggaaaattgaataaagagtcaagacccatccgtgtactattttcgggagacacatctcatgtgcaaggacacataggctgaaaattatacggatggaggaatatttaccaagcaaatggagagcaaaaaaaaaaaaaaaaaggcaggggttgcaatcctagtctctgactaaacagactttaaaccaacaaagatcaaaaaagacgaaggatattatataatggtaaaggaatcaattcaacaggaagagctaactatactaaatatatatgcacccagtacaggagcacccaggttcgttcataaaacaagttcttagagacctatacttagactcccacacaataatagtgggagactttaacatcccactgtcaatattagacggatcaattagacaaaattaacaaggatattcaggacttgaaatcagctctggrtcaagtcaacctaagagacatctacagaactctccaccctaaatcaacagaatatacattcttttcagtgccacatggcacttattttaaaatagaccacataattggaagtaaaacactcctcagcaaatgcaaaagaactgaaatcataacaaacattctctcagaacatagtgcaatcaaattagaactcaggattcagaaactcasttaaaaccacaaaactacatggaaattgaacaacatgctcctgaatgactcctgggtaataatgaaattaaggyggaaatcaagaagttctttgaaaccaaggagaagaaaggcacaatgtaccagaatctccgagacactgctaaagcagtgttaacagggaagtttataccactgaaatgcccacatcagaaagctagaaatatcgcaaattgacaccctaacattgcaatgaaaagaactagaaaagcaagagtaaacaaatccaagagctagcagaagacaagaaataactaagatcagagaagaactgaaggagatagagacacaaaaaatccttcaaagaatcactgaatccaggagctggttttttgaaaaaattaacaaaataaatagaccactagcttgactagtaaagaagaaaagagagaagaatcaaatagacataataaaaaatgataaaggggatatcacaactgacccaacagaagtagacactaccatcagagaatattataaacacctctacacaaataaactagaaaatctagaagaaatggataaattcctggacatatacaccatcccaagactaaaccaggaagaagccaaatccctgaatagaccaatgacaagttctgaaattgaggctgtaattaatagcctaccaaccaaaaaataaagcccaggaccagatggattcatagctgaattctaccagagctacaaagaggcactggaaccattccttccaaaactattccaaacaactgaaaaggagggactcctccctaactcatttgatgaggctaacatcattctgataccaaaacctggcagagacacaacaaaaaaagaaaacttcaggccaatatttctgatgaacatcaacacraaaatcctcaataaaatactagcaatccaaatccagcagcacatcaaaaawtttactcatgataattaagtaggcttcatccctgggatgcaaggctggttcaacctatgcaaataaataaatgtaatccatcccataaactgaaccaatgacaaaaaccacatgattatctcaatagatgcagaaaaggcctttgataaaattcaacatccctttatgttaaaaactctcaataaactaggtttgatggaacatatctcaaaataataggagctgtttatgacaaatccacagccaatatcatactgaattggcaaaacctggaagcattccctctgaaaactggcacaagacaagaatgccctctctcaccactcctgttcaacatactattggaagttctggccaaggcaatcaggcaagagaaaaaaaaaagaattcagatagraaaaaaggaagccaaattgtctttgtttgcrgatgacatgattctatatttagaaaattccatcatctcagcccaaagacttcataagctgataagcaacttcagcaaagtctcaggatacaaaatcaatgtgcaaaaatcacaggcattcttctacgccaacaatagacaagcagagagccaaatcatgaatggactctcattcacaattgttgcaaagagaatgaaatatctaggaatacagctaaaaagagacatgaaggacctcttcaaagagaactacaaaccactgctcaagaaaataagagaggacacaaacaaatggaaaaacattccatgctcacagataggaagaatcaatatcctgaaaatggccatactgcccaaagtaatttatggattcaatgctaatcccatcaaactaccattgacattcttgaaatgtcacataattagaaaaaactactttaaatttcctatggaaccaaaaagagcccatggagccaagacaagcctaaggaaaaagaacaaaactggaggcatcatgctatctgacttcaaactacactggaagcctacagtaaccaaaacagcatggtactggtcccaaaacagacatatagatcaatggaacagaacagaaacctcagaaataacaccacacatctacaaccatctgatctttgacaaacctgacgaaaacaagcaataggtaaaggatttcttatttaatgaatggtgctgggaaaactggctagccgtatgcagaaaactgaaactggaccccttcctcacaccttgtacaaaaattaacttaaggtatattaaagacttaaatgtaaaacccaaaaccataaatccctagaagaaaacttaggcaatatcactcgggacataggcatgggcaaagacttcatgagtaaaacaccaaaaacaattgcaacaaaagccaaaattgacaaatgggatctaatcaaactaaagcacttctgcacagcaatagaaactatcatcagagtgaacaggcaacctacagagtcggagaaaatttttttgcaatctacccatctgacaaaggtctaacatccagagtctacaagggacttaagcaaatttacaagaaaaaaacaaatggccccatcaaaaagtgggcaaaggatatgaacagacccttctcaaaagaagacattcatgtggccaaaacacatatgaaaaacagctcaacatcactagtcattagagaaatgcaaatcaaaaccacaatgagatactatctcatgccagtcagaatggcaattattaaaaagtcaagaaataacagatcctagcaaggctgtggagaaataggaacacttacactgttggtgggaatgtaaattagttcaaccattgtggaagacagtgtggagattccttaaggatctagaccagaaacaccatttgacccagcaatcccactactgggtatatacctaaaggattataaatcattctactataaagacacatgcactcatacgttgattgcagcactatttacaatagcaatgacttggaactaacccaaatgtccatcagtgataggctggaaaaagaaaatgttatacatgtacaccatggaatactatgcagccataaaaaggaatgaggtcatgtcctttgcaggtacatagatgaagctggaagccatcatcctcagcaagctaacaaaggaacaggaaaaccaaacactgcatgttctcacttgtaagtaggagttgtacaatgagaacacatggacacagggaggggaacaacacactgaggcctgttgtaagatggagggtgaggggaaggagagcatcaggactaatagctaatgcatgcatgatttaaaacctagatgatgggctgataggtgcagcaaaccaccatggcacacatttaccatgtaacaaacctgaatgttttgcacatctatcccggaacttaaagtaaaataaaaataaaaattaaaacatttttaaaaaagaaagaaggacaacagaaattatctaaactgaaacacaaagaggagtggtgggtggggagagagaaagaaagaaacagaatatttcaaagctgtgggatcatataaaatactctaatacatttgtaatgggtatcccagaaagagacaagaaagaaaatggaagaaatatttgactatttgaagaaktgatgsgcaaaaatatttccgaaattaatgacaagtaccaaactacagatccagaaactcagagaacatgaaacagggtcaataccagcacacagggacacacacacacacacacacacacacacacacacacacacacacacacacacactgctataaatataaccaaactgctgaaaacaaaagaaagaaaatcttgaaggcagtcatagacaaaattagcattgcttacagaggaacgaagataagaattatggtaaacttctcttaagaaatcatgtaagtcaggaagcaggaaccattattaaagtgctttaaaacaaacccctaccaaaccagaattttatacctactgaacataaaataaagactttctcaagcaaacaaacaaacaaaaaaaaaaacaaggaaattcattatcatcagacctaatctaaaagaagtattaaatgtttagacagaaggaatgtatcacagagagactgaatctacataaagaaatgattaatgcagtatatgaaataagtgaaaataaaataaaattagtttatcttaaattgttccaaaggataactatctaaagtaaaatagtgatgcattgcatgtttatatcatatataaaagtaaagggtctgatatcagtatcacaaagatgggagggaaggaattagaaatataccaatatgagatcattacatcagatgtgaagcagtatgacatgatttgaaggtagactgtgatmaactraaaatgttttaagcagcataatgatccgtcaaggtgtccatgtcctaatccctggaatttttkactgtattaccttatacaagaatgggaactttgcagatgtgattaaattaaggatcttgaaattgtgagattaccctggatrcttgtatgaagccaatataatcaaaggagttgttacaataaaaacatgcaggtggcctttagaagctgaaaaaggccaggaaagattttctcctcagagcctccagaaggacaagccttgccgacaccatgactttaccctgctgaaactgattttggatgtctgacatataaaactgtaacataacaaattagtattgttctaagctattaagtttgtggtaatttttttacagcagcaataataatagggtgtatgttgtaaatcttagagggaccagtaaaaatatttttgaatacctaaataaaaaatcaaygtaagagagaaaaaggaatcattaaaaattctcaattaatataaaagaaggcagaagaataaaaaagaaacaaagaacagatggaataaatataaaacaaaaagatggtagatttttattgcaaccatataaatagtaacataaataaaaatgatctaaacacaccagttamagcgtaaagattgtcagagagaaaagcaagaccaaatcataatatgtctataaaagacccaccataaatataaagacataacagatatatacataggttaagagtaaaataatggagatctatgtgccatgcagacaccatctgttatgaactgaatgtgtcctagtaaaactaatttgttgaaactcgaatcctcaaagtggtggtattaggagrtggggcctttgggaggtaattaggtttagatgaggtcatgagtgaaatcttcatgatgggattagtcttcttgtaagaagaggaggaggcacctgagcttcctgtttctgacatgtgagcaagaaggtagccatttgcaagtcaggaagagagccctcaccagaacccaaccatgctatcactctgaatttggactttccaggtwtcagaactgtgagaaataactgtctgtgtttaagccactcagtctatgatattttgttagagcacccaagctaagacactatgaaatagaaaactgaggtatattaacattggacaaaggatacctcagaacaagggtattattagggataaagaaggtcattacatgacgataaagaatacaattctctaagaggacaaaacagttttaatgtgtatattcctaacaccagagcttctaaatacatagaacacaaattgaaaaagctgagaggtgaaataaacaaatccacaattatagttggatacttcaccattcttctgtcagtaattgaacaaatagaaagtcagtaaggatagagaggatgagaggatctgaacaacactataaaccaaatatacctaatgaatatttagagaactttccacccagaaaagcagcacatactttactttaaattgtatattgaatatacactgagataagccatgtattaagcaaaaaaaaaaactttaataaatttgaaagaatagaaatcatacaaagtatattattgggccataacagaattaaagtagaatcaatagcagaaagacatctggaaaatccataaatatttggaaattaagtatcatacttctaaaaaacccatgtatctaagaggagcatctaggaaatgaaaatgtattttgaaacaaatgaatgtaaaaatacaacctatcaaaatgtgtttgtacctaatagcagttcttagaaaaaacaagtatggaattaagagctttttttaggaaaaattttctaaaatcatatatcagcttccatcagaacaaactaataaaaagagctgactaaactcaaaacaggaggaaataataaatataaaatcgtatgtcaatgaaactgaaaacagaaaaataagaggaaaaaaatcgatgaaaccaaaagtttgtttctttgaaaatattactaatattgattaacctctacttagactgtctaaaaaaataagagagaacacatgaattaccaatatcagaaacaaaggagaaaatatcattgcagacatattaatcttagaaataccatatgtacggaaggcaagccctaaaatgatcccaaaggaaaaatgcctggtgatatccatgcctgtacgtaatctcctccctctgactgttagctsgaattcttgccttgcctmtaatgagtaaaatattccagaaatcatgagactccacttctgaaattaggttctgaaaggaccgtgacttccaccttgggcattctttcttccttttccctagactgcttgccctagggaaattcagatatcatattgtgagatagctttgtgaaagcccacatggtaagggactaaggcctgacaataaccacttgagtcagcttggaagtggatcaccttcctcagttgagtacaggtgaagccactgtcctggccaacagctcaatggctgcttcatgagagattatgaaccagaggtgtccatgtaagccagcctccttatttgacccatgggttcctgactgtaacaagtatttgaggttttaagcccctgtctctaattttaggtataatttgatatgcagcaatagatatctaagttaataaggagatactacaaagaattctatgcccataaatttgataacataaatgttagygaaccaactttttgaagacactaccaaaattcactcaagaagaaacagataacctgagtaattgtatatctatttataaaattgaattgtttaaaatgtttcaaaaaaaggcttagatggcttcattcatgaatattaccaaatatttaaataataccaatgaaataatatttcttctaagaaataaagaggaaagaatatttcccaactcatcttatgagaccagcactgtcctaatattaaaaccataaaaagctattacaagaaaattacaaaccggtgtccctcatgaacccagatacaaaaatcttccaaaaaatttagcaaatgaaatccagcaatctatacaaaaaataacatatcacgagtaatttgagtttgtccctggaagtcaaggctcatttattccaaaatctatcaatatcatgaatgatatagtagacttagtagaaaataaaataaaagttcaatatatgtaggaaaaagcattcgatgccttgtcacaaagatgtcactaaaggcaaagaagcccctgctcttcccaaagccaaagccaaaccaaaggttttgagagccaagaaggcagtactgaaaggtgtctatagacacagatccayatgtcacccatcttccagtcacccaaaatactttggatttggaggcagcccaaatatttttggaagtgtgtccccaggagaaagaagcttgacyactatgccatcatcaattttccttgaccatagagttggccatgaagaagaaggacaacaacaacacacttgtgtttattgtggatgtcaaggccaacaagtaccagaccaaacaggctgtggaaaagttctatgacattgacatgaccagtgccaacaccttgatcaggcctgatggagagaagaagacatttgtttgactggctcctgactatgatgctttggatatagccaacacaattgggattattaaaactgagtccagctggttgattctaaatatacggttttcaccaagacaaaaaaagcatttaacaaaatttaacatccatttatgatatcaacttctagaaaactaggaatggaaagggacttatcctaatacgggtcatctccaaaagcctacataaaacttcatatgtagtagtaaaacactaaacgttttccctctaagttctagaacaaggcatcagtgtcattttccactactcatatttaatattgtcctataaatccaatataataagttaggaaaggtaataaaaaggatgtagatcagaaaaaaattcaaactatttgcatatgacatggttgtctgcatagaaagtctcaaaaaaatgtacaaaaaagtttatagcactaagaaaagagtttatccaggttgtaaggtacaatgtcaaaactaaaaaatcctttatataataaatttgaaatatgcaattataaaaacagtgccatttatgataccataataaacatgttgacataaatctaaagaaaaactatgttgtatctgtatgaaaactgcagaagactgataagagaaataataatcataacttaaattgagagatacaccatgttcctggattggaaggctcaatagagttaaaatgtcagttatccttaatttgattgaaaaaattaattctaagaaatcccaatcaaaattctagctgggtttttgtagatattaaaaagctgattctaaaatttatctttcctcaaatacctggtgatctttggatactttttagaactcaagacttaggctctaaaaagcccactgaaagctttgtgtgttttgatgaggcttgtgcattagtgggcttcacttggaatgatagagcagtgcctctgcgttttgttggaaggctcacacaccagyatttactgggcttttctctggggctgcttactttctcttgtgagggaccagtatgtttctgatttagtgagtgttgaaacatgcccagttgtcaatattctctgtttctgacttagtgtgtgttgaaatatgtccagctgtcaacattctattcaggtgagctggggaatagaattggagtggggaatgggggcggcatgtggtttcgtatttaatgggtaaaattttacttaacctcttatgtttattgcaatttatcatccccactttctattgactggtttctctgagtctggaagttctgtgattccatttttctaggaaaaaagcttctagtcttcccacagaaagaaataaacatatagctgtcaagaaagcagaagaagaggccaggtgtggtggctcacgcctataatcccagcactttgggaggccaaggcaggtggatcacgatgtcaagagatcgagaccatcctggctaacatggtgaaaccccgtctctactaaaaatacaaaaattagctgggcatggtggtacacacctgtagtcccagctactcggaaggctgaggcaggagaatcacttgaaccaggggggcagaggttgcagtgagccgagatcgtgccactgcactccagcctggtgacagagcgagactctgtctcaaaaaaaaaaaaagaaagaaggaaagaaagcagaagaaacctggattttaacactctctctcatgctcactttaaattgaccaccacactttctatttcatccttcatctcctttggaagtaaatgttgcctctatcctgagcatcatatgggttttgcttaacaagttagtgtgccttgtattggcaccatcatgctggtattgatgcttgaactatcttttcttttttatgtcaataactgtgcctttgttctctttctatcttaaaatatttatggacatcgttcattgactattgccttgttttctattgacatccatttcctgccatttttgtggagttgcataagacagtagagataaatgattattttaactcaagccatttaatgtctgaggttgatatgactttcacatgattcttggtcattctctttttcttttgtgaaatctcagtttatagcctttgcccattattctgttgctttgtgtgtgtgtgtgtgtgtgtgtgtgcacgtgtgttcatgcacacatacactttactgtttgtaggcaatcattacttcctgggagataaaagtaattggaacagaaaagaaagttgggccagtaagtcacacaagcatgacttcacttttgactaagaaaaacaaagagtatttactaaaatatttttaattattaaaaaatatgtataaatttcccaccttatattatacacaatgctaagatgtgaaaactggaaagctgagcttttattttttatcacagtatcaaatataattcctgtgcctcgccatctacccaacctggcctcagttgtttgtgttgcttctgacctgaggatccctatatacaattttgattgaggttgtattgaatctataaaccagtttttaggaaatgcatacatttgcaaagctatatttttcaaactaaaaacatttactacttcacccacttttcagtgtacagtttagtggcactaagtatattcccaatgttgggtgatcattaaccaccattcatcttcagaatattcttcatcttctcaaaatgaaactgcataaccattaaagaataactctccatttcccttttccccttaaagatggcaaccatgattctactttctttttctctactttctactttctgtctttatgaatttgattaatctaggtacctcagataaatgaaatcatatagcatttgtctatttgtccttctgtgattagcttatttttcttaacgttatgtcaagtttcatggacattgctgcatgtgccaaaatttctatcttttttacggttgaataatattttattgtatgtatataccacattttgtttattcaaacatccatcgatgtatacttggcttgcttcttccttttggcagttgtgaataacactgtttaaaacattggtgtgcaaatatttgttcaagactgtgctgtcaactcttttggaagtagaattcctgactcatctgtatttttaattttttgaagaattgccataccattttggcttgcagctgtatcattttaaattgccaccagtagtacacaagaattcctatttcttcacattcttgccaacacttgttacctgttagccatccaaacaagtatgaagttatatctcattgtggtttggttttaattttcactttcctaatgattagtaatgttgagcatcttttcatgtacttattagccattgatatatattctttggagaaatacctattcaagtcttttgtttattttttaaatcaagttttgttgttgaattttagggattctttatatattttgtatattgaacttgttatcagatttgtgccttgaaaatactcaatctgatgttttacactgacttatcttgtagttcacaattctcttttctgtgttcaatctaatagacctatctattaaatatttaattttgattactgtatttttcagcttttatgatataagagaatgaaccctagactgactgatagatactggtaaattctaccaatcagaaatactggcaggagattaaaggagggaaggagactgagggcaggctatttattacgctaatctcctccctccatccctggagagcattcatatttttgcaggatcaggttctgccaggcactctctagcacacatttctctctctgtgtccagtaattgctttttccctcacctcttcagcattaatggggataatgtgctgctgctattaccaattctcagatattggactaatgctagtgttttccttatatactacacttagctttgtaaataatcctttcattcgacactcctcaaatcacgcataccatatttttgtacctgggacagtgactatagtggatttgatatgtagaaaattttagtttatcattatttactagcttctggagtttggcctactttaaaaggctattgcgatgcacatattttataaataaaatatcccatgtttacttttactacttttatggcttcaaactttacatttaaatctatgatccatctggattttcttgtgattttagaagtgaagtataacttatatttttcctacacttttttatggccatttttgtttatttatgttctgtttgacttttggaatctgcttatcaaatttaaaaaaatactttttttgacaaatatataatgtataaattcacttacggataaatggcatctttaggagactacttagtcatgaaggccatactgtttttcattcagttatttgtttgtatttctcactagcttttctgatttttctttgcagagatcttttacagttcctgttacctctggtattttatcaaagttgttattgtaaatgttgttttctttcattataacttgtaagaggtttttatttgcatatacaaagcctggtgattcttgatattgttattttaattttgaacccagccactttactgaattatctttttgtttctagcagtttaaaattttctgattttccctttagctagcctctgataacagaacatagaagaggcattcagactatgtggtcagtaaaagcttcaagtaggagttgatccctcagctgagtccccaggttcaagtctgtcttagtccattttgtccataggtatttctaaaaggaatacctaaggctgagtaatttataaagaggtttatttgactcatggttctgcaagctgtacaagaagcgtggtgccagtgtctgcttctggtgagggcttcaggttgcttccacgcatggaggagatgaaggagagctgatattggggctggcctgggrgaggttccaggctctttttacaaccagctgtcatgggaactaacagaattcactcatccctgcccactcacagggagagcattaatctcttcatgaaggatctgtccctatgacccaaacacccccaactaggtcccacctccaaccattggagattaaatttcaacaagagctttggaagctcaaatattcaaactataacaaatttggatcttgataattttaggtaaaactgagaggaatgtgagaagaatgttctagcttaaggaaggaagatatgataatggttagaaggaacaaagcatgtggttgacttgagaacttaaacatcgttcagtatcacatggcaataggctatgaaatggagagctgtgagacatgaaggataagaaaggctgagttcacttagggcctttcaaagaaagagatcaggatttattctaaaaacaatggaagcaactgcaggatattagaagagcaacttgctgacccagagaatgtatccttgtggttaaggtgtctggtataagattgttgtaataatatgggagatgaactttgttatatgaataaagaggaatgcatgggttgaacacatacaaacagggtaaaatctgcaaaatttggtgactgactgccagaaaaaagaaaggaaagcaagaggttaaaaattcttgctgagcagtgggtgagggaagggatttgtgagaggaaggagatgagttcaattacagtgagtttgcatttgagaagcctatggaatacatgcatagtaatttacttaatatatctatgtattaggtcaatgcaattcatttatttattcaacaaatattgattaaatattctctccatgtcagatacattcttcatggacatacattaggatctgcttcctgccctgctgtagcaattgacaaaggagggtgaatgtatataagtacttgatacattttgtatctacaaaaagcaaggtgactattataggatgaattgtattcccttcaaattcatatattaaatttccagtccatagtacctcagtgtatttggagataaagtctttaaagagtgattaagctaaataaagccatcaggatggggcc

SEQ ID NO: 94550 - DNA, 13212 bp, Homo sapiens
ctcactcttgtcccccaggctggagtgcagtgggttgatcatggctcacagcagcctcaactgcctgggctcaagcagtcctctgccttggcctcctgagcagctggaactacagatgtgtgccaccacacctggctaattaaaaaaaaaattttttttttcatacagacaggatcttgctgtgttgcctgggctggtttccaactcctgaactcaagcagtcctcccacttcagcctcccaaagtgttgggattacaggcctgagccactgcactgggcagggtggggcctttaagaggtaattaggtcagctgggcgaggtggctcactcctgtaatctcagcactttgggaagccaaagtggtggatctcaggtggatcacctgagatcaggagtttgcgaccagcccaaccaacgtggtgaaaccccgtctctactaaaagtacaaaaattagcggggtgtggtggcatgcgcctaaaatcccagcttctcaagaggccgaggcaggagaaaaaaaaaaaagataattagatcatgagggctctgccctcttgaatagataaatactgttatcatgggagtggctcctgatggatggacgacatttggcccaatttcgtgtctctcatttgcttccaccttctgcccttccatcctgggacagccctttgccagatactgcatgaggttcttgcactttccagcccctaaaactgtgaagctctgagcaaaataaactttgcttcttttgttttgttttaagacagagtctcactgtcacccaggttggagtgcaacggcatgatctcggctcactgcaacctctgcctcccaggttcaagtgattctcctgcttcagcctcctgagtagctgggattacaggcacccaccaccacgcccagctaatttttctatttttagtagagacaggctttcaccaggttggccaggctggtcttgaactcctgacctcaggtgatccacccgcctcggcctcccaaagtgctgggattaaagacatgagccaccgcacccggccgagtctcactctttacccaggctggagtgcagtggagaaatctcagctcactgcaaccttcgtctcccgggttcaagcgattctcctgcctcagcctccccagtagctgggattacaggcacaaactaccacgcccagctaatttttgtatttttagtagagacggggttttaccatgttggccaggctggtctcgaactcctgatctcaagtgattcaccggccttgggctcccaaagtgttgggattacaggcgtagccaccacacctggcctctttctttcttttatgagacagggtctccctctcttgcccaggctggaatgcagtggtgtgcccacagcttactgtggcctcaacctcctgggctcaaacagtcttcccatgtcagcctcccaagaagctgggactacagatgtgtgcaaccacacccaactattttttttgttttttcgtagagacggggtctcactttgttgcccaggctcccttttttattttaaattttttttaattttattattattattttgagatggagtttcactcttgttgcccaggctagagtacaatggcgcaatctccactcactgcagcgtacgcctccggggttcaagcaattcccctgcctcagccgcctgagtagctgggattacaggcacgtgccaccacgcctggctaattttttgggtttttagtagagacaaggtttcaccctgttggccaggctggtcttgaactcctgacctcaggtgatccacccgcctcggcctcccaaagtgctgggattacaggcatgagccaccacgcccggccaatttttatttttttgagacaaagtctctgttgcccaggctggagtgcagtgtcccaatcttggctcactgcagcctccacctccctggttcaagagattctcctttgtcagcctctggagcagctgcgattacaggcgcccaccaccatgcctggctaatttttatatttttagtagacacagggtttcaccatattggccaggttggtctcaaactcctgacctcaagcaataacgtccgcctcagcctcacaaagtgctgtgattataggcatgagccatcacgcccggccctgtcatttttaaaagatcattttaaatgcactgtgctaattttactgctgatgggcaagagtggaatcaagaaaactagttaggaggctactgctgtaattgaagggaaagatgacagtgtgcagtctcgaatagggtgattttggaatatgctttgatgagcaaaggtagagctgtcagtatttgctgctgaattggttgaaaggtgagagagactggagtcaaggactactccagggtttttaaaaccagtattgggaaaaatggagttgtcatacagtaaagtagagaagactgggggaggagccggtaggaggactggaaatgtggaattggggtttagacacattaagttcattgcatcaggtggacgtgttgtattgagtaggcagttggagatacagacctggagtctgtgggagacagtggggtttctttggtgggggggtcatcggcatctaagtgctattcgaagtcatgggactgcagaagattatattaacaatgtgaatattcacaagcttgaaaaaatgaatgtacggaagagagggggtcacactttacctcttattatcccacccccaggggtgaccttgtgagccacaccacacaggtacacacatgcacgcatatgtacacacactgtcacagaggggcaaagggggttggcgagagcgggactgagagcagatcccaggcctcagaaacccatgccacctgggccccctccctgtggccttcctggatgctgtagggatagcagatctgtctgggtcagcaggtcagggcgactggcaggagggggtggctgggaggcctcttcctccaagagcaggggcagcacatcatccaacaggcagagaagaccctcatccgaggtaggggcaggtcagggtggagtgcctgcctccttcccccagtgccccacacaaagctccaagagctccagcaggctcctgtctgtttccacttcccaggctttctgtggtcatgtccctgcccactccaaagggccatccccctcagccttgcctccctctcagacccagctgaatccctgcctcggtaccgccccctcctggggcactcctgaccccttcctctgctgcatcctcacctagcctcctatctgttcacacctcccctgcaccagacctccacagaagttcagacagtggctctacaaccctactggcccctatcaatgacttctgcccccctgggaccctccactgggctcaggaaagacaggccattgtagcaaagtagccagtcctgtagccccagctggacctcctggtgaggcagcttgccagatggtggggatcgctcagtcctctggggcagaacagggtgagtggggctgtctccctttgattcacttagccctctttcttctttacacatttgcaaaatgtgacagtagtcatattactattcattctaataacagtccttgctggctattaaacctctatactagcactttcaggcattatctccaccattactaaaaccgattagataggtattattatacccattttacagataagaaagactcagagggccggtcgcggtggctcatgcctgtatgcccagcaatctgagaggccgaggcgggcggatcacctaaggtcgagagtttgagaccagcctgaccaacatggagaaaccccgtctctaccgaacatacaaaattagccggtatcccagctacttgggaggctgaggcaggagaatcacttgaatctgggaagcggagattgtggtgagccgagattgccccattgcactccagcctaggcaacaagagcgaaactctgtctcagaaaataaaaaaaaaagaaagaaagaaagaaaagaaagactgagagaaagcaaggaacttgcctgaggtctcatggctaatggggtccaagtcacaacctgactctaccccaagccaattcccacctaactcctcctgcagatgccccttgggtatccagagactgtgtctggcctttaatatggacttgaggtgtgatcctgggctggcttctttctggaccttggtttctgagtttttcggttggttggttcatttgattaattgacagggtctcactctgtcacccaggctggagtgcagtggccccatcatgctcactgcaccctccaactcctgggctcaaggaatggtgccactgtgctgatttttaaattttctttatttttgtagagatgggggtctcactgtgttgctctggctggtctccaactccggggcttgagcgatcctcctgcctccgcctcccaaagcgctggcattacaggcgacagccatcgcgcctagctgcgctggtaaaactggctaacgcgatctatcttaattagccacccacagctgctaccgccgccccatccccagggaccacacagacccaggggacaaagaagggcgcgggagacagcggctgaggaagcctttactgcggggcggccggaggatcgccgagctcagggtcccccaccgcactgcgcccggcctcgtcctctgccccaggcccggccccgcccccagcctcggccccagcctcggcctttgccggaacgtcgccgaacacttcccggtgcatggcggtgacgtagttggagccgctggggtcgtccaggcgcatccgcagcaggggcaggaagcgctcggtggtgaagtagcgcagggtcggcttcggggcgcgcaaagcggtgaggaagacctgcggcggcgggaggagagctgtggccaccgctgcgcgccggaggacgcaccgcccccactcctggagtccagcccggcgctcacctccgccacctcctcagggttctgcgccgcctcgcgaaagacttgcttgctgtgggcgaggtattggtagaagcggtggaaggtgtggatgtccgtgcggtccagcacctcctctgggctgcccaacaccttctccatgaaggcggtgtgcactgggccgcactcgatcaggctcaagctgctggccggagagcaacgagtgggagggggcggacgccagccaggccccagtcccagccccaaccccagtcccagccccaaccacgtcccggcccccgaccgcgagcagcaccgctgcgctgggaagtgaggcggaaagggcgctggggataaccagaacatttgaaacgcgggttcctgccggagcagccctcccaaatccatctgaggctacaagggagccctggtgtcaggattcgaatctagcggggtccctggccgctgtgtgaccttgggccagtcacctaacctctctgggctggagcttccccataacaataccaacacttcagcagctaggtcagcaggtggcacaatgcgtgccatgcgcccagcccaagtgcctggcacacagctaatgtgagccgggcagagagggccagggagatcgccccagagcggctcccgcaggacagggtgctcggcgtctctaggtcagagttaagagggttcggggaacgggggtgttgactcactggaccccaaagggcagcagcagaaccgccagactctcgcataagccttcgagcgcgaacttgctggcgcaataaacgtcattgaaaggcagcccttaggtggggagacgaggttcctgaggcgcagcggccagggggtcatccccgggcagacggtgcccctccaagctgacggcacccccctccaccctccccgcggaacctgccttcaaggctcagctccgcacacaaagaatctggagctgccgaggccactccctaccactcacccatcaatcctcccacgctcccggtcaccaacacgcgtcccgaaccgcgcctcttcatgtctggcaggaaggcctgcagcatccgcacagtccctactacattcacgtccagcacagaggccacggcgtcctcccccagcgcctccagcggccccagcaggcccaggcctgcgttacacactgcggagacaagaggcccgaccagcccgcctcagcatcaccctcagcacggcctgtcccctcgtgctccckgggcctgggaacatgttggtttcaacgcagggcggagaaggctcctaggagcccatatgcttccaggaggctcacccagcacgtccacgcggccctcagtcacgcgttcccgggcagcggccacggattttgagtcccttacgtccagctgcaacstctccagggatccckgagggcatgccagggcccgggccgcctcccacagccggccctgtgttttcaggtccctcaacgtggcatacactggaggttttgggagaggaggaagatctgacttcccttctrgcctccaagggctyctcccttctctccctccctgtccctgcctatctatacctttgaagctctgggatggatctgaagccagacgtacggccaagtgcaggccgatgcccgaggaacagccggtgatgagcaccacggtgcrggccatggtgagactgtggggagaggctggggctctgggcttgatatcacctgcttcgccccgccccgcctgcgggcccccaccccttgttgtgtctcccacgcaatctcaaggataagccttcctgcgggtccctggcccgctctccccaccctgttctgagccaaaacagacatgagcccactgcttggaacaacaaactgtcctggttgctggtcaragggaggggaggctttacaagcaggtgtgggttcccacgtgggcacagagtggccccctgggcagattcccctgggtatgcctctgtgccacaggagcgattayagtgaccgcagtttgctgcagaggctgtgaaagtaaaggcgttgggaggtgggagatgattgtatatgtgytggtttcgtccagggttcctagctcataactcacatgaccatggttacagtcttacgttgtcatgttggggtgcctcaggcctcaaaaaacagcctttcgtctctctgaccttctcctgtcctcttttcagctgcccaaggcaggactctaatctgattgtgggttgtaggatcctcattccagagtgggtccttgccccataccctggagaaaggaatgctgcacaaaggcccaaagaatctggactggccttgctgggcttagatcagaccctttttgcccaatcacattatcacagttgtccatgcttcagtcatggacagccaatggagttctccataaaaggcccaaaggacagggttcgggagcttctgagagctgaacgtgtggaggctgacagaatgtgcccagagggtgacgtaaccccaactctatggagatagaagctcctgctctggacccttccagaccgccctgtctgtatctcttcatatggctgtttatttctatcctttaaaatatgctttgaggctgggcacggtggctcatgcctctaatcccagcactttgggaggcccaggaaaggggattgttggagcccaggagttcaagaccaggccaggtaacagagtgagacccggtctctgcaaaaaatattaaaaagcttcccaagtagccgggactacaggtgtgtgccatcactgccaccatacccagctaattttttgacttttttgtagagacggggtctcactttgtttcccaggcttttttttatttttgagacaaagtattgcttaggttggagtgcagtgtcttaatcttggctcactgcatcctgcatctgcctggttcaggcgattctcctgcatcagcctcccgagtagctgggattacaggcacccgccaccacgcccagctaatttttagtatttttagtagagacggagtttcaccatgttggccaggctggtctcaaacccctgatgtcaagcgatctgcccacctcagcctcccaaagtgctcggattataaaaaagtgccaccccacctggccctgtcatttttagaagattattttattttgagacggagtttcgcgcttcttgcccaggctggagtgctgtggcacgattctggctcactgcaacctccacctcccgggttcaagcagttctcctgtctcagcctcccaagtagttgggattacagacacgtcccaccacatccggctaatttttgtatttttagtagagatggggtttctccctgttggtgaggatggtcttgaactcccaacctaaggggatcagccagcctccacctcccaaagtgctggtattacaggcgtgagccactgtgcccatcctaaaagatcattttaactgctctggggtaatttcactgctgatgggcaagagtggaatcaagaaaactagttaggaggctactgctgtaattgaagggagagatgacagtgtgcagtctggaatagggtgatttggggatatgctttgatgagcaaaggtagagctgtcagtatttgctgctgaattggttgaaaggtgagagagactggagtcaaggactactccagggtttttaaaaccagtattgggaaaaatggagttgtcatatagtaaagtagagaagactgggggaggagccggtaggaggactggaaatgtggaattggggtttagacacattaagttcattgcatcaggtggacgtgttgtattgagtaggcagttggagatacagacctggagtctgtgggagacagtggggtttctttggtgggggggtcatcggcatctaagtgctattcgaagtcatgggactgcagaagattatattaacaatgtgaatattcacaagcttgaaaaaatgaatgtacggaagagagggggtcacactttacctcttattatcccacccccaggggtgaccttgtgagccacaccacacaggtacacacatgcacgcatatgtacacacactgtcacagaggggcaaagggggttggcgagagcgggactgagagcagatcccaggcctcagaaacccatgccacctgggccccctccctgtggccttcctggatgctgtagggatagcagatctgtctgggtcagcaggtcagggcgactggcaggagggggtggctgggaggcctcttcctccaagagcaggggcagcacatcatccaacaggcagagaagaccctcatccagaggtaggggcaggtcagggtggagtgcctgcctccttcccctagtgccccacacaaagctccaagagctccagcaggctcctgtctgtttccacttcccaggctttctgtggtcatgtccctgcccactccaaagggccatccccctcagccttgcctccctctcagacccagctgaatccctgcctcggtaccgccccctcctggggcactcctgcccccttcctctgctgcatcctcacctagcctcctatctgttcacacctcccctgcaccagacctccacagaagttcagacagtggctctacaaccctactggcccctatcaatgacttctgcccccctgggaccctccactgggctcaggaaagacgggccattgtagcaaagtagccagtcctgtagccccagctggacctcctggtgaggcagcttgccagatggtggggatcgctcagtcctctggggcagaacagggtgagtggggctgtctccctttgattcacttagccctctttcttctttacacatttgcaaaatgtgacagtagtcatattactattcattctaataacagtccttgctggctattaaacctctatactagcactttcaggcattatctccaccattactaaaaccgattagataggtattattatacccattttacagataagaaagactcagagggccggatggggtgggtcatgcctgtaatcccagcactctgagaggccagggcgggcggatcacctgaggtcgggagtccaagaccagtctgaccaacatggagaaacctcgtctctactaaaaacacaaaattagctgggcgtggtggcacatgcctgcaatcctagctacacttgaacccgggaggcagaggttgtggtgaactgagaccgcgctattgcactccaggctgggcaacaagagtgaaactccatctcaaaacaaaagaaaaacaaaaaagaaaagaaaagggaaaggaaaggaaagcactcagagaaagcaaggaacttgcctgaggtctcatggctaatggagtgcaggtcacaacctgactctaccccaacccaagtcccacctaactcgtcctgcagatgccccttgggtatccagtgactgtgtctgggctttactgtggacttgaggcatgatcctgggctggcttctttctggaccttggtttctgggttgttgggttggttggttgattagattaattaattgacagtgtctcactctatcgcccaagctggagagcagtagctcgatcatgcccactgcagcctccaactcctgagctcaaggaatggtgccactgtgctaatttttttattttagagatggggtgtctcactatgttgctcaggctggtctggaactcctggcctggagcgatcctcctgcctcggccttccaaagctctgggattataggcgacagccatcgcgcctagccgcgcagatataacgggctaacgtgatctgtcttaattagccatccacagccgtcaccgccgtcccatccccagggaccgcacaggcccaggagacaaaggagggcgcgggagacagtggctgacggagcctttcttgcggggcggccagaggatcgctgagctcagggtctcccatcccaccggccccgcccccggcctcggccccagccccggccccagcctcggcctctgcgggatcgtcggcgaacacgtcccggtgcatggcggcggcgtagtcgaagccaaaggggtcgtccaggcgcatcagcagctggtgcaggaagcgcctggttgtgaagtagcgcagggtcggcttcggggcgcgcatagcggtgaggaagacctgcggcggcgggagaggagctctggccccggctgcgcgcaggacgacgcaccgcccccgctcccggagtcccgccccccgctcaccttcaccacctcctcagggtgctgcgcctcctcgcggtagatctccttgctgtggtggaggtattagtgcaagaggcggaaggtccgggtgttcgtgcggtccatcacctggtcgggaccgcccaacaccttctgcatgaaggcggtgtccacagggccgcactcgatcaggctcacgctgctggcccgagagccgcaagtgggcagggacggaggcgacccaggcgccaagtcccatctcctgccccagcaccggccccgaccccggccctggccacgacccagaacagcaccgctgcgtcccgaaggtggaaagagcgctggggataaccagaacatttgaatagcgggttattgctcgacagccctcccaaacccatctgaggctgccaggtagccctggtgtcagaattcgaacctggcgggatccccggccgctgcatgaccttgggccagtcacctaacctctcttggctggagcttccccataacaataccaacacttcagcagccaggtcagcaagtggcacaatgcgtgccaatgctccagcctaagtgcctggcacgcagcaaatgtaagccgggcagagaccagagcggcttccgcaggacagggtgctcggcatctctaggtcagagttaagagggttgaggagacgggggtgttgactcactggaccccaaagggcagcagcagaaccgccagactctcgcataagccttcgagcgcgaacttgctggcgcaataaacgtcattgaaaggcagcccttgggtgggaagatgaggttcctgaggcgcagcggccagggggtcatcccccggcaggcagtgcccctccaagctgattgcaccccaccccctaaggagcctgccttcaaggctcagctctgcacacaaagaatctggagctccggggcccggtccctgccactcacccatcaatcctcccatgctcccagtcaccaacacgcgtcccgaacccggccgcttcatgtctggcaggaagtcctgcagcacccgcacagtacctactacattcacatccagtacagaggccacggcgtcctcccccagcggccccagcaggcccaggcctgtgttacacactgcggggacagaggcccaaccagcccgcctcagcatcaccctcagcacggcctgtcccctcatgctccaggggcctggggacatgttggtttcaacgcagggcggagaaggctcctaggagcccatatgcttccaggaggctcacccagcacatccacacggccctcggtcacgcgttcccgggcagcggccagggagcttgagttccttacatccagctgcaacctctccagggatccctgagggcatgccagggcccgggccgcctcccacagccggccctgtgttttcaggtccctcaacgtggcatacactggaggttttgggagaggaggaagatctgacttctcttctggcctccaagggcttttcccttctctccctccctgtccctacctatctatacctttgaagctctgggatgggtccaaagccagatgtattgccaagtgcaggccaatacctgaggaacagccggtgatgagcaccacggtgcaggccatggtgagactgtggggagaggctggggctctgggctggatatcacctgcttcgccccgccccgcctgcgggcccccaccccttgttgtgtctcccacgcaatctcaaggataagccctcctgcgggtccctggcccgctctccccaccctgttctgagccaaaacagacatgagcccactgcttggaacaacaaactgtcctcgtttctggtcagagggaggggaggctttacaagcagatgtgggttcccatgtgggcacagagtggccccctgggcagattcccctgggtatgcctctgtgccacaggagcgattatagtgaccgcagtttgctgcagaggctgtgaaagtaaaggtgttgggaggtgggagatgattgtatatgtgttggtttcgtccagggttcctag

SEQ ID NO: 94551 - DNA, 20231 bp, Homo sapiens
cttcttctaatttccccagtttcttgtccttccagaaatatgcacgtgttttttaatccctttctttacattgatggcagtgtgctatacatactgtatatgataattttttaccaatccctaataatagcaaaagactgaaaacagtgctgcagtagacatccacatacttttgtgcttttgtgcaaacatgtaagtgtatttgtaggttaactttctagaagtatttcctagcctagtgattttgaagagcaagaaggcagggtggacctggggaaacccgggtaagacatctgctagtgattgtgagctgagaggtgatatacatgagcggggaaacccagatcagggcagccttaggcctgaaaactcctgtgtgtgtccagctgatctctattatgataaggtgctcgaataaggaaggtttgtatcctgggccctgggccctggcccctgccaacatttccctctcacctcctctcacctccatccaaaccaggaagcacaagcctatgcagacgacaacagtttgctgttcatggagacatcagcaaagactgcaatgaacgtgaacgaaatcttcatggcaataggtcagttgcttctcctcccctcctctctccaccacagcaagggcatatcacctgtctgctggtctagagtgggcctgcggggtcccttcaccactctttttttttttttttttttttttttttgagatggagtctcgctctatcacccaggctggagttcagtggcacgatctcgactcactgcaagctccgccccccaggttcacgccattctcctgcctcagcctctcgagcagctgggactactggtacccaccaccactcccagctaattttttgtatttttggtagagacggggtttcacggtgttagccaggatggtctcgatctcctgacctcgtgatccacccgcctcggcctcccaaagtgctgggattacgagcgtaagccactgcgcccagcccccttcaccacttttaaccttctgataaaattgttttcatcatcacctgactcccagatgtagatgttggttgttcacccgagaagttcctgaagcctgggccagagtctcaacatttcactctctgagcctgtagcctgccacccatttcagagcctgccatcactacccctacccactgcctaggagtttttagctcatttggctctggaatcttccttcctgggttgcagatcctggctctaccactcattagctctgtagtcttgggcaagttatttaaccttactttgccgcagtttcctgaaaacaatcagaatgcacctgacacacagaagccctcaatatgtgagttaccactgattgggtataaaggccagaatctgctccagtggaactgggagagttattggggtacccccaacaaatgcacttttccccctcccaaacagctaagaagcttcccaagaacgagccccagaatgcaactggtgctccaggccgaaaccgaggtgtggacctccaggagaacaacccagccagccggagccagtgctgcagcaactgagccccccttgcctgcccgctgcccccgcctcctccgcctgaatgacccgactggaatccactctaaccaatcgcacttaacgactcgggccaccactgggggggcagggggaggggtccaccatgatttctccatataattttgatcataggccggagtgagtcattccacctgcacctttctgtacaaatactaattcaattttaagtcttaagtcacttttttaatatatatgatcttctgctcttcccacttcctcccctttctactgctctcccattttcccttgctgggagtagccacatgctcttgccccccaacccttgtatatggggacagtggggtcagtgcagctaccctttctttccctcctgcggaacagcggacccagcaagagcatccacatcctcactttgttcggagtggtctttggtttgggcggtggggcagaccttgggaaggggcttaggaagggagaggcagctcttccttcagctggctctcatcaggctgcagccccctccccgctcccacctccctgctgggaaaccacagcattatcacagcattattgtgacagccacgaacccattgcccacaacccctccaccctcggtcaccccaacctctggctctgagccctgttctgaccaaatcatgatgatgagtatttgggggtgggtgggtaagggggggagtgggaggggacggaaccaactttttctgtattttgtattgtatgttttcttcaacatgtaaccaatcagtatcttgtcaatatagtcagccgatcgatcgacctcacaattgtcttccttgtctttctctggcagtttatcagacagtgccctctgtagttgaagttgatttaaaatgaaccactgaatcttgttaaacaaaatcttcccctctaatgtgaggggatgctggtggtcatggtaaccaagagaaagaggctcttactgttagcagctccgatgaggtagctgacctgggctgaccaagtttgaagtttcagggcccgtgttcacttctccacctcccttcccctcccccacctaccagatcatactggggtgacatgcagtgtgtatttgatgatcattagtctctgaaacaccagaaacaacctctttgggtttttttggttggtctttaccagtgagagggtctggatcctctctcttcctgaagaggaaggaatcccaacagcccctggaacgctggactggtcttaaggccaagactgtagccactggctttcctcaccacctctgtccacgtcacccccccacaccacatccaagttgccccagtccagctctctactggttctggaatcaggtctgggcactcagctctctgctgctacctgttggagctgctgctcagctagggccacactctcctccaatttctcccagggccacagaggcctgattcccttttttttttttttttctttttttgagacggagtctctgttacccaggctggagtgcagtggtgctatctcaactcactgcagcctccacctcctgggttcaagcgattcttctgccttagcctcccaagtagctggaattacgggcacccgccaccacgccctgctaatttttgtatttttagtagagacagggtttcaccatgttggccaggcttgtctcaaactcctggcctcaagtgatccacccgcctcagcctcccaaagtgctgggattacaggcgtgagctaccacaggcggcttttttttttttttttttttttttttttgaaacggagtctcactctattgcccaggctggagtgcagtggcacgatctcggctcactgcaagctctgcctcccgggttcacgccattctcctgcctcagcctcccgagtagctgggactacgggcgcccaccaccacgcccggctaatttttttgtatttttagtagagacggggttttaccgtgttagccaggatggtctcgatctcctgaccttgtgattcgcccgcctcggcctcccaaagtgctgggattacaggcgtgagccaccgcgcccagcatttttttttttttttttttttttttttttgagacagagtctcactctgtggcccaggctggagtgcagtggcaggatcttggctcactgcaacctccctccacctcccaggttcaaacgattctcttgctcagcctcccgagcagctgggattacaagcacacaccaccacgcctaatttttgtgtttttagtagagatggggtttcaccatgttggccaggctggtctcgaactcctggcctcaagtgatctgcccgcagaggcctgattcttggtggaccaccaccttgagggtgcctttcctgcctcctgtgcctccagtccctctacctctgacttccatccccagaaaagacaacggacaccaaggctgctgcacatcgcgtcgtttgtttaccgggtcaggttggaagccttagagccgaggctcccgagtctcggggacggtcctgtttgggcttcagggagggccagcgccacacactggcctctgacccacagctgcccggagggggtcaggcagcaggtcatggcggtaggactcaggttggacggtagcattttccggtgcaccttctgtgacatgcggtaactgaccctttccgggtccctgacgtccagttgctgctgtccggtcaccatcagccattggccatccacctgcaccaccagttcctccggggcgaagccgtgggcatccagcttcatttggaaaccgtctctggcatggtcattgtcctcctgagccgctggactgtccctgagcagccgcaccggcattgtggccacccggttccgttcagcaaggcccacgctgggacaccgggatgccacccggctctcgttggagaaggtgttaccgactctctgcatccgagtcagcaactaactgctgtcaaagggcgcgaggctcccagcgcagagctaggcgcacggacgcccggagaggagggacctcgcgcggcctacccgagctcagctccgctcgctcggttcccttcgcttctgcaaacgcaggcggagttcgggatcagccacgcccatcttacctccaagagccagactgtcagcgccctggcgcgcccgcagctgctctcctcccagactccgaccctttctccgcccttccccaccttcgttaatggacccggggaggccgcagctgtgaaggaactggatccacgaccaggccagacccgagggagccgcaccctggcgcagccaacagcagattgatcccccagctggaagggggctgtcttgccttctaaggaccaggcctggggcaaggattgttcctagacagagccaggggagggcggccttcctgggtcatccaccctacctctccctgaccacccacaaccccacgcggacacgcgacacgaggaggtggactggtctctccggctgcattaattcttcccggggcgtcctgtgctgcaggctgtggtctgggctctggggccacaaagatgaagacgcagttggggcttcaggagagtggctcccagtgcacagagaaagacctagccctcctccgcctcaccctccacgtcagtagccttcttggtgaccatcataaccacagctatgcctctggtgctgttatttgataattttttttttttaagagacagggtatcattatgttgcccaggttaatctcgaactcctgggctcaagcgatcctcccatctcggcctcccaaagtgctgagattacaggcgtgagccacctcgcccagcctataaactttattttttatttttttgtagagattggtggggggggtctcccaatgttgcccagcctggtctcgaactcctgcagggctcaagctctcctcccgcgtgagccagccacccggcctgataaactcctttttgttgagtgatactattaaatacatacatactgaaaagcgcagaaaaaggtgcaggtgaatgtcaggaggagaacacacccaagtcaccaccacactactgcagaactgttgctacatctcatctctaccgcagctgcaattccgtgtccggagccgcgtggggcagggcctgtgcgggagttgggggagggggttaagtgggagacaggcgcgtgaaagaggcagaccccacgattctccccaagactccttgtccccaagaggacagccatcgtgactctcccggactccattaaaagagattacaagtgaagaggggtcaatgtggggccttcactcaggcctcacttggctgtcaggggccaagagacaggacagaaaagtctggaagctggaggcagtgaggggaaggcgcgggaagactacaactcccgtcatgcgccgcgcagcaacgcctgcgcactgagcgctggttgcccatgcggccctagggctgggagcgcggcgccgctctccgctgcgggggaggccatggcggaaccttcccaggccccgaccccggccccggctgcgcagccccggccccttcagtccccagcccctgccccaactccgactcctgcacccagcccggcttcagccccgattccgactcccaccccggcaccagcccctgccccagctgcagccccagccggcagcacagggactggggggcccggggtaggaagtgggggggccgggagcgggggggatccggctcgacctggcctgagccagcagcagcgcgccagtcagaggaaggcgcaagtccgggggctgccgcgcgccaagaagcttgagaagctaggggtcttctcggcttgcaaggtgggggcggggcctggggtgaaggggcggggcttggggcatcccagggctctggtgggaatggggtcaaagctctggctgcggagcggctcttgccccagaggtataggtcattgactgatccttccacctccaggccaatgaaacctgtaagtgtaatggctggaaaaaccccaagccccccactgcaccccgcatggatctgcagcagccagctgccaacctgagtgagctgtgccgcagttgtgagcaccccttgggtaaggcaggcagcgcccttggagctgggggcaggtgctgggtcctgcttggacagggtgacaagtgccacaaagcttcatctctgaaaaaatcaaagatgcctcgaaggagggattgggttgggggggkgtgtgcaccaaggggggagaaaggaaatctctcagcccagaacaggcccaggcaacccaacggttgatatcggagcagtcagtctcactgttggtcacactggttggaggaacagagtgtgtatcttgcttggctgtgaagagggtcaagaagccttgttgatttcttctatcaatttttcctaactstgccatctgtcttgcagctgaccacgtatcccacttggagaatgtgtcagaggatgagataaaccgactgctggggatggtggtggatgtggagaatctcttcatgtctgttcacaaggaagaggacacagacaccaagcaggtctatttctacctcttcaaggtgagcttccactaaaggagggtgtgagtgaaggaggtggggccttgaggggttgtctgcagctctgcccccctcccctctatgcccccttcctcttctctctagctactgcggaaatgcatcctgcagatgacccggcctgtggtggaggggtccctgggcagccctccatttgagaaacctaatattgagcaggtgagataggggaattggagatagcggataggagaattggggacagcttggaggagtggggagcctgtgttctccatyctcctcaagctgagaacactggggaggttcagagaaggaagggtgttttgtgctaacctcagggtgggcatggtggtagggagggggcagagcttttctatagagagcacccgagagagagaggagaaggagaaccttgtccctggccagggagcatcttcctttgtctaagaaggccctgcgggctgctcacacctcattcctggttttatyccccacccaccccttctcagggtgtgctgaactttgtgcagtacaagtttagtcacctggctccccgggagcggcagacgatgttcgagctctcaaagatgttcttgctctgccttaactactggaagcttgagacacctgcccagtttcggcagaggtctcaggctgaggacgtggctacctacaaggtcaattacaccaggtaggcccagccaggggcagcttcgggggaggcttgcaggcccagcctgggttcagtggtttccgccctcacctgtctccccctcgaccccctactccagatggctctgttactgccacgtgccccagagctgtgatagcctcccccgctacgaaaccactcatgtctttgggcgaagccttctccggtccattttcaccgttacccgccggcagctgctggaaaagttccgagtggagaaggacaaattggtgcccgagaagaggaccctcatcctcactcacttccccaagtaaggctccttctggcctaccaggatttggccccaagttcacatcctccctgttgtccccttttttccaggaaggcttcctggattggtccctcctctccctccatgggccttttgggatctgggcgtctacctggcagacttgcccatggcccagaagcaacttgctagtactagtctggggatggcaggtacatagcccaagctaacgctgcccccacccgaccctacgccccagtagatgttactaattgtttcccatgggggcctggacacagcctcagactccttccctgcacaactctycaagaaaccagaccttaagcttgaagtgaaaccaatttctactcctgttctggtcttttctgtaccattttcttctgttcggccacaccttttaaaatctaggccataactcccctgttcaaaaaaccctgactgactaatcctggctctctagtgccccctgccatcaggtgggaacaagagatggcaaggtggggtggagtctgagcccattttgatactgagggcagtgagggggctcagggtgacaaggtgccctgcctggccacacagcacaggatgacatcagctcagacctgtctccctgtgccacacagcgtggtgaaactgagcctgtttgatctctgtcctggatgtgtcctgtcctcttaccttcaattggaggctcccagaagacaggggctgtcccctctctcaggtccccagttccctaagagcagggtctgtctctgaccagcctccagtccctctgctgcctggcccaggctgcaccctggagaacagagttgtgggacagactgtgtcctccctacagattcctgtccatgctggaggaggagatctatggggcaaactctccaatctgggagtcaggcttcaccatgccaccctcagaggggacacagctggttccccggccaggtatgtgccatggtacgctctgtagggtgtctggcctgcctggctgagctaagcctcctgggtggaagagagctcasctgggccggaggccctggatcccactgagggacctgccaccggcttcagcycccccagtccctgccttctctctctctctcctcagcttcagcacccccgtccctgaytctctctcctcagcttcagcccccgtccctgacttctctctctctcycctcagcttcagccccccatccctgacktytctctctctctctcagcttcagtcagtgcagcggttgttcccagcacccccatcttcagccccagcatgggtgggggcagcaacagctccctgagtctggattstgcaggggccgagcctatgccaggtggatacttgacccctgacctctgaccctcattcactccttcccaaaccttttttactgatcctgagcaaccttgcctgcctccccaataggcgagaagaggacgctcccagagaacctgaccctggaggatgccaagcggctccgtgtgatgggtgacatccccatggagctggtcaatgaggtcatgctgaccatcactgaccctgctgccatgctggggcctgaggtgggcagcccgacctgctgaccagttgggggacccccaccaacctgagaccccggctcaccacccctcttctgtgcccagacgagcctgctttcggccaatgcggcccgggatgagacagcccgcctggaggagcgccgcggcatcatcgagttccatgtcatcggcaactcactgacgcccaaggccaaccggcgggtgttgctgtggctcgtggggctgcagaatgtcttttcccaccagctgccgcgcatgcctaaggagtatatcgcccgcctcgtctttgacccgtgcgtcccccagagagcccctcccccagggcagcacacccagttcccttcctcctcggcctcttcactcctcaaaattggggatcccctgctccccacttctgaggttcatcctttgagcattcwtacttctcactgcccaaccctgactacagctcagacttccagggctctggggacctgaaggggacagtcaggggctatgacatgcccccctctctcttaggaagcacaagactctggccttgatcaaggatgggcgggtcatcggtggcatctgcttccgcatgtttcccacccagggcttcacggagattgtcttctgtgctgtcacctcgaatgagcaggtcaaggtgagcrcggctccccggccccagccccagtccacggcccactcctgagtttgggccagttcggagcagcaggatgtgtggcatgcagcagcccgttgctcttctcttagttagcggcccgttcctcacatccccacaaggtggcagccgtactttgataactgtggattaggaaaccacctgttgacagacggagcccaagcagcagccacactttggtggacctgtggacttgggttttctgcatcacaagaacatttacatacatgggggaattaattactttactttttattttttatttatttttttgaaagagggtctctctcacccaggccgcagtgcagaggcatgatcagggctcactgcagcctcaacctcccaggttcaagtgatactcctgcctcggcctcccaagtagctgggaccacaggcatgcaccactacgtctggctaacttttgtattttagtagagacagggtttcaccatgttgcagggtttcacccaggctggtctctaactcctgaccttaagtgattcacccacctcggcctcccaaagtgctgggattacaggcatgagccaccgcgcccagccraactaatcattattacagtagccctatgctgatagtyttggcttctgtcctttgttacaacagacccactcgtagggtctctggctctgtgtgtcgcatacctcagatctgtgtggtgcctcattggccctgacgtgtgggaggcattgctcctgctgctcagacctctggtgactccctctcccrcttctcccaactctgaggcccagggactgggaatcagtggcctgtgttgggtttggacccggccctgccacggctggcagcctgaccttgaacacatttcctaacgtagctgagtttcggttttctcttctgtaaaataaaggtggtaatactcgcctctggggttaatttgagaatcggtctgtaaaacaggaagcactgcacctagcccagagtgagcttagaaagcccgcacccttcactttctccccataagctccccttcctctgtcagctgcctttcttcctctttgcctggatgctctcgctctctctacctcctttccaatctacccgctcttctctggtctctgagacctctccagcaccaggcccatcctcagctcctggtgagtcctgcttccctcccccgcagggttatgggacccacctgatgaaccacctgaaggagtatcacatcaagcacaacattctctacttcctcacctacgccgacgagtacgccatcggctacttcaaaaagcaggtgacccgtagcctcgtcccacaccggtcctttgcctggaggctggggtaattctgtccagcccctctgtggatggagtaggagtccctttgcgtcccctacttcacctgacacctgccaggagagtctccatgcctatcttctttcctctgctgccattgccccaggggagaatgagggcctgtggggccagtagagcaggccggaggaactgggggtcagtagagcatcctggaggaactagggggccagtaaagcaggccggaggaactggggggggcactagagcaggctggaggaactggggggctagtagagcaggctggaggaactggggggccagtagagcaagctggaggaactgggggccaagagcaggctggaggaactggggggccagtagaggaggctggaggaactggggggccagtagaggaggctrgaggaactggggggccagtagagcaggctggaggaactgggggrctcttcgggatgagtcaggagtgggcagctgacctgggacctttccagggacagtttgaaccctcacagtgccccaggaggaggttcaggagcaggaggtggcaagtggcacgtgctactcctctggtgctcccaggtgagggacgacagaagttgggaaatacttatggatggactgggtcatgaccatccaccccccagggtttctccaaggacatcaaggtgcccaagagccgctacctgggctacatcaaggactacgagggagcgacgctgatggagtgtgagctgaatccccgcatcccctacacggagytgtcccacatcatcaagaagcagaaagaggtggtgtgcacacatgcgcatctgtgggatttttcatgaatgggcatgcagagggcgagcacacgtgtgtagacctgttctacrtctacatgcatatatgtgtgtgagtgaggaggggcaggccaggatcttggctcttgctctgctyccttggggaagttatgaggggaggtgctggattaggtggcgttgcagctgggtgggtgcagccagtggctcygactgtggccctgggaggggttgttgytggggctggagttggcccctcagtcccttccttccctcagatcatcaagaagctgattgagcgcaaacaggcccagatccgcaaggtctacccggggctcagctgcttcaaggagggcgtgaggcagatccctgtggagagcgttcctggcattcgtaagcaggggtctcagttgcagggtagtgggggcacsatgcttggggtgtggactggcattcttagagacattctcccacttcccactttgcaggagagacaggctggaagccaytggggaaggagaaggggtgagtgtcaaaggagccgggttgggggtggggcagagggacttggagcctcagacttggygtctctcgccccaggaaggagctgaaggaccccgaccagctctacacaaccctcaaaaacctgctggcccaaatcaaggtggggagaccaggtttcctttccagggcccctgcaccaatggctgtggcctcttgatgcagtgtggggtgggtagtggtctcgggctggcgtgggcgcagcagggctgtccccagcccggctcttctctccagtctcaccccagtgcctggcccttcatggagcctgtgaagaagtcggaggcccctgactactacgaggtcatccgcttccccattggtgaggaccttccattccatccccttccctcctcttctgtycccacacctgctcctgccctcactgcgccctgcagccccagggggcccaccctggtggacagccctgccgtggtcttcagcctcttaaagctgtgctccgtctcctgctgccccagacctgaagaccatgactgagcggctgcgaagccgctactacgtgacccggaagctctttgtggccgacctgcagcgggtcatcgccaactgtcgcgagtacaaccccccggacagcgagtactgccgctgtgccagcgccctggagaagttcttctacttcaagctcaaggagggaggcctcattgacaagtaggcccatctttgggccgcagccctgacctggaatgtctccacctcggattctgatctgatccttagggggtgccctggccccacggacccgactcagcttgagacactccagccaagggtcctccggacccgatcctgcagctctttytggaccttcaggcacccccaagcgtgcagctctgtcccagccttcactgtgtgtgagaggtytcctgggttggggcccagcccctctagagtagctggtggccagggatgaaccttgcccagccgtggtggcccccaggcctggtccccaagagctttggaggcttggattcctgggcctggcccaggtggctgtttccctgaggaccagaactgctcattttagcttgagtgatggcttcaggggttggaagttcagcccaaactgaagggggccatgccttgtccagcactgttctgtcagtctcccccaggggtggggggtatggggaccattcattccctggcattaatcccttagagggaataataaagctttttatttctctgtgtgattgtttctttggtgtagtcccagccttagcaggctcaccttggcccccagggacctcttgcaaactggaggctgctctccccagcaagcctcaggcctggtcctgtgctcctggggtgatgggtcctacctgcctgcagccccccacctctccctcctccaggctgctcctgatccagatgccagggcagcaggggtcagaacctcctgccttcaccttaacctgggtggatgtggttacaactgactgcagaagggccagagcgtagaggatcctgtagcactgaaagagtgcttccctgttagcacacgtggttctttttcttggggcagggataggagattcgtaagtcggctcagctggctcctcccctcagtttcagtttccatttctgatttctgctctctgcgctgagcacagcggcaccaggctgagctaagcagggccgccttgggcaggcctacgtggtggtgcaggcgagacccaggctgggcaaggcgcaggtgtagcctgtgttactcccaccccccccccacccccaccttttggccacagcaggcttctgatgagttttgagggtgtccccccccccacctccctcaagtggggtggagtcctgggcaaagggaggtctctgtaccgactgctctggccaggagttgggatgagtggagggcccagtgggtctgagtcccctgccattcccagaatggagctgtggccctaccaatgggaggtgatcatgcctgccagggcgctggcgcagcagcagtacttaaccggagtttgtactcacggcagttggcgatgactgttagcacaaacggttcttttctcttggttctttttcctggggcggggatgggagattcctaagtcggctcagctggctccttccctcagtttcagtttccatcttgggtctctgagctgagcagagtggcaccaggctgagttaagtgggactgccctgggcagacctacctactagagcaggtgagtcctgggctgggcagggggcaggtgtagcctgtgttactcccgcctcccccttttgggcagagcagggtcctgatgggttctgagggagtcctgccccacctccctcaagtggggtggagtcctgggcaaagggaggtctctgtactgactggtctggccaggagttgggaggggtggaggagtcggtgggtctgagtcccctgccattcccagaatggagcttcggtcctaccaatgggaggtgatcatgcctgccctggagggcaagaatatcatcatctggctgcccacgggtgccgggaagacccgggcggctgcttatgtggccaagcggcacctagagactgtggatggagccaaggtggttgtattggtcaacagggtgagtggtctgtccctaccccgctctcccaccaccaagcagggtcttagctcttcaggcatctcccagtccccaccagaactccaaagctgctgtggccatcgctaagctcacctgtctttccaccctggctcagtacccagccatgtcctgcgggtcaccttaccgcctccctacccctggccccagattcagctctcttttcccagctcattctccacccccaggtgcacctggtgacccagcatggtgaagagttcaggcgcatgctggatggacgctggaccgtgacaaccctgagtggggacatgggaccacgtgctggctttggccacctggcccggtgccatgacctgctcatctgcacagcagagcttctgcagatggcactgaccagccccgaggaggaggagcacgtggagctcactggtgagggccatggccgggaggaaaaagatacgcatctggggtacctcctttcgccaaccccagggcacctcctggagtcaaggtgttgggagttttagtgggagtgaggggttgcctgttcacaaaacccctgcaggcactctagtagaaacaggccgggctatcgtgtaggatcttaggccagtcccttccccagctgagcctcggtttactaatctgtgaaatggaaagaagtcttccctgcctggctcctcatcctgggaccagctgcaggttgtgaagggaagaaggaattcttacatcattgtggggactacttgaaagctgatgggaggaagggctttgcaaacataggtcacagccttcccccctgtgccctcagtcttctccctgatcgtggtggatgagtgccaccacacgcacaaggacaccgtctacaacgtcatcatgagccagtacctagaacttaaactccagagggcacagccgctaccccaggtgctgggtctcacagcctccccaggcactggcggggcctccaaactcgatggggccatcaaccacgtcctgcaggtcagcctggcccctgtgggcctcccactgccagacccaccagggacttccctccctccctgcctgccctgccactaccccgtccccaccagccctaccaggctctccatggcagggtctggccccttcctcacctaagacccagcctccaatggtttcttatggtacaaagaattaactcccgactctactgtggtttacaaagttccacgtgatctacctctccacctcatttcctgcgccctccctgttgtagctcatcctacagttacactggcctgccttctgcatgttgaacatgtagggcttgttccatctcggggacctttgcatttaccatttcttttgcctagaatgcgcttccctttgaacttttcctgctgcctcctccttgtcattcattgaacagcttaatgccacctcttgaaagtcctccctgatctctgctctctgtcatatcatccagtgctatcctcttcagagcttgttaatgcgctctgcaaggttttattgttttctttttttttttttttttgagatggagtctcactctgtcgcccaggctggagggcagtggcatgatttcggctccctgcaacctccgcctcccaggttcaagcgattctcctgcctcagcctcccgagtagctgggattacaggcacccaccactatgcccagctaattttttgtatttttagtagagacggggtttcaccgtgttggccatgctggtctcgaactcctgacctcgtgattcacctgccttggcctcccatagtgctgggattacaggcgtgagccactgtgcccagcctctttttttttttttgagacggagtctctgttacccaggctggagtgcagtggcacgatcttggctcactgcaacctccacctcccgggttcaagtgattcttctgtctcagcctcccgagtagctgagactacaggcgcgtgccaccatgcctggctaatttttgtatttttagtagaggtggggtttcaccacgttggccaggctgtctcaaactcctgacctcaggtgacccgcccgccttggcctcccaaagtgctgggattacaggtgtgagccaccatgcctggccggttctattattcttttactggtttattatctgcctctccaactccaatctgagttcctttgtatccccagtgcctagaacaagacgggcacagagagggcgagcaatatttgagtagacgaatgcccacattctcctgtcctcagctgggatccatcctgccccaaatctttgaccattgtccccacagaccctccctttccagtaaagtcctctgttgcccccagctctgtgccaacttggacacgtggtgcatcatgtcaccccagaactgctgcccccagctgcaggagcacagccaacagccttgcaaacagtacaacctctgccacaggcgcagccaggtacgcgggggcagggacacggcgagagcgggagccggtgtgaagttaggacacctaggcttgggccctgactctgccctcactagctctgtgacttcaggtcacttgctatgtatccaagcctcaatttctcctttctgtgaaatggggcagatacagcccatgcccacagcccgctctttggattgactcagaaggcaccactggtgtctgtcacatcactgtcatgctggggagtgcactacaaaccagagagcagggatactttgtgctgaggctctactgagccctctctagtgtggacacggcctcgtgtctgccatgactggactggacaaggactaggtgtcaggtccataactataccaaatgttacacttggggtcaggtttgagcccatgctgtggtctggagggagggagtgagtgagcagatagctgaaagaacccttggggggccataggcaggtgaaatgtagttttattcagcagcggctctctcacactgtccacctttatctgggctgtctgctccggccctgtggctcctgctgcccccacgcctgcagctgctctccctggccggcaaggccagctctgtcagggtcagcagcttaactctttccctctgggcacaagcgggttcctggctccccactgcccaccttcaaggcgaccggctgtcccttgcaggggttagtagcattattctctctctgggcgagcaagcgtgccctgccgtgccgagctgaaccaagctccgtgaacagcgtcagcagggcagttttaccttctactgacagtagagtccagtatgaacttacacaaacaggttatatagcaagtggagtacgtgcctgccccccaaactcgctgagtcactctggcccggatgtccgcctcggcctattccttgaccaaagcacgtccatgtgccttacactaggcatcaccgtgcccaggccaaagggtaagagcacatcgcgggtgagacagggcaggactcccccacaccctagccggcctccctctggagctcacaccacagctaagacagatgggtgaggcagtcgcggtgtgctacacgccggggtcagcacccccactgggtgcccatcctccaacgtgtatgggaatcccctccaactctcctcttgctcaggatccgtttggggacttgctgaagaagctcatggaccaaatccatgaccacctggagatgcctgagttgagccggaaatttgggacgcaaatgtatgagcagcaggtggtgaagctgagtgaggctggtgagaggggcagcccttcaggcggaggcgaggatgtgggagtggtcaggggcggggcctgccggggcggaggcctttggggcggggcctatccaccccaggggtggagtcgagtgggacggccctatggggcagggcagggggcggggctgtgggctgctcagaccctgcgccctcttcccgcagcggctttggctgggcttcaggagcaacgggtgtatgcgcttcacctgaggcgctacaatgacgcgctgctcatccatgacaccgtccgcgccgtggatgccttggctgcgctgcaggatttctatcacagggagcacgtcactaaaacccagatcctgtgtgccgagcgccggctgctggccctgttcgatggtgaggggcgggagggggcttcggggccggggatgatgggacctggatgcgaggtcagaggccagggcacaggcgccaaggtcggatgggaaggtgcccgtgaggatactggtggagatcctatttttctaaccaaaatccaaggccatgggtaggactgatttatttcctcatttgtgaaggtttttgcttagttgttaaaattaattaacattgttgactttttttttttttttaatagtcggggtcttgctctgtcacccaggctggaggacagttgtgcaatcatagctcactgcaacctcgacctaatgggctcaagtaattctcacccttcagcttcccaagtagctaggcgtacaggtgggcaccaccactcccagctaattaaaaaaaattttttttgaagaggcggagtcttgctttgttgcccaggctgatctctaactcctgggctcaagtgatcctcctgcctctgcctcccaaagtg

SEQ ID NO: 94552 - DNA, 40178 bp, Homo sapiens
aagaagaagtagggagtccttttcaggccatatccatatatagtttgctttaacagtattttttaaagacttaaaaaacatgcctgggggtgaggtagaggagagattctctttcaaaacagttttgctactgagcaaaaactagagtcaatttccctgtcctgttgccactatccagattggctgcagtcctcccctagctgttcccactacaggcctctggcatcccaaaacccccagctttgtctggttcagtgaacaccccagtccacacactgcagtggaacctctcttaactgctttgcccccaaggatgtatgtttcaagagaacgctgcctggcttacaacgtgatttggaaatacgctgctggctgtgttttatgcgttttatcaagtgtttttacctttgtgctagctgggaccatgaagggcacagttttagaaggttgaagttaaataatgatttcacaccagaaaatgttcagcaggggcccccaagcagcaagctgccaggcaatggtcaatattcttgaaccctggaggcagccacacagccagaatttgcacagtggccactggtagagtttggggttggataatatagcagttaagcccagggtctttggaggcaagctaactgattggccatgtagtcttgggcaagatcattcacctctctaaacctcagtttcctcatctgtaaaatggggatgattttacctataggcatcctataggtttggggaggattacatgagtaaatgaacatgaagtgcttagacagtgctaagtagatgctgctgttagaattattatgacttcctgagctgttgttttcttaccacccttaaagaaggaaggaaggtgtttgccacatctaacaaccttcaaggatgctggcaacttcccagctgggtctattttgattgtcatcccacttagacatgtcacattctaaactaagacatttcagctgagggtcatgggtccagggacattctgggggaactcagttgagattccagggtgaaaccaacaaaccgggtcttcacattctgccacttttcattgtctttaggctttgagcaatttaagccccatttacaggttctcagagacccgtgccagatagctcagaatcacatgaggagctggtttaaaataggaaattcctggccccacccaggactacttcacagagcctcttgggagagaatctgcatttcaacaggctcctcgttgcctcttctgtgagctggagagtaagaactgcagcacttgggccaaacacagtggctcacgcctgtaaacccagcactttgggaagtcgaggtgggagaattgcttgagcccaggagttcaagaccagcctggacaacatggcaagatcccatctctaccagaaataaaaaaattaactggatgtggtggtgcacacctatggtcccagatactcgggaggttgaggtgggaggatcacttgagtccgggaggttgaggctgcagtgagctgtgatcgcaccaccgtactccagcctgggtgacagagcagaccctgcctggctcaaaaaaaaaaggcaaaaagaactgtagcagttgaacttgagaaactgacctctacagcccaagggcataaaaccaagtgccaggctcacacaagcactgaagaccctttttttttcctttatgaatacaaaaaaaagactaaataaaattgaaaaataaactttcaaaggctaaccaaaaatcatgaatgagtaaatgaagcagccacacgtatctcgtttcttctttgctgctcctcaccatgttgtccctgaaggggaaagcattaatatttattgaggggattcttcctcagtacaaaagtaacgtgagattaatgcttaaaactccaaaaccacagagaaacactaaagaaaagacaaacaggctgggtgtggtggctcatgcctgtaatcccagcactttggaggccgaggcaggtggatcacttaaggtcaggagtttgaaaccaacctgaccaacatggtgaaatcccatctttactaaaaatacaaaaattagctgggtgtggcagcaggcacctgtaatcccagctatttgggaggctgaggcaggagaatcccttgaaccaggaggtggaggttgcagtgagccgagatcgtgccactgcactctagcctgggcaacacagcgagactcctctcaaaagaaaagaaaagaaagaaaagaaaagaaatatgagaaataagggggatcatatataattgttagctccagggatactttagaataatgtgtttaaaactgttttgtctggagacttaatgtatagcatggtgactatagttaataacaatgtatagtacacttgaaatttgctaacagagaagaacttaagtattctcaccatacacacacatccaaaagtaactgtgggaggttatgaatacgttcattaacttgattgtggtaagcatcttgcaatgtttatgtatatcaagtcattacattctgtaccttaaatatattcaattttacttgtcaattatgtctcaataaagcagggggcaatacaattttttttaatttagcatgcaaaaattttttaaaaacatcaaagctgagtccacagtgttgattttacttgtataaaatatttctgcaaaatttatcctatcaagatatttggttcactccagtcccgccctagaaacctgtcacactttcagttcaggacctacagacccattgcaaccggccagctgtctctgctcccataaggggaggtcccaagtcatcaaaggggacactgtccctaaggtcagctgtaaccttccatttggagtgtcttctttttattatgaaacataactaaggctgggcatggtggctcacacctgtaatcccagcactttgggaggccaatgcgaatggatcacctgaggccaagagttcgagaccagcctggccaacatggtgaaacccccgtctctactaaaaatacaaaaattagctgggcatggtgaccatgcccgtaatcccagctactcaggaggctgaggcaccagaattggatgaatccaggagttggaggttgcagtgaaccaagatcatgtcactacactccagcctgggcaacagagcgagactctgtcttaaaaaaaaaaaaaaaaaaagacaaacagaaatcattgctcagaagccaacactgtcaacagtttttgaggttctttctggccttttatataatgtgtataaatacacaattatttaacaaaaacctcatttatacacaggctactctttcttgaatttgagcctgctcttttaaaaaaaaaaaaacttagcaaggcattatgaatattgtctcaggtcaacaaattctttttcaccatagttttaaacagcagcatagcgttccaccatagatatgctgggatatttaatccctgttcaatcactgaatattcaagctcaacaattaattaaaaataaaataaggccaggggtggtggctcaagcctgtaatcccagcattttgggaggccgaggtgggtggatcacctgaggtcaggaattagagaccagcctggccaacgtggtgaaatcctgtctctactaaaaatacaaaaattagctggtgcggtggtgcatgcctgtaatcctggctactcaggaagctgaggcaggagaatcgcttgaacctgggaggcggaggttgcagtgagttgagatcgtgccactgcaccccagcttgggtgacagagtgagactccgtctcgaaaaaataaaataaaataaaataaggcagattctaattcataggcctttggtggacatctgtcattttttaagctctacagttgacttcaatcagtagccaggattgatggctaccatgaaagactacttctagaatattctcaggaaacctttagaattggaacacaaataaggaaaatttccaggccctgaggacatcagcaaatctggattatataaaccccattaattccagggtgagcagtgctgtcacacatcacaaaaggaaagactactactccttttgtccttgtcacaaatggactgacttgatccaatgtccctaagatggtgccaacttcatttctgatgaacagccactttgagaactgtactgtgaggctctgccaactggaatgacttgtttttatcattttttttctctctctttcattgcttcatttaattgccaagctatgactggagtttgctgtgtctttggggctcaggtgtacaaggaattcccacaaattaaaaaatatattcaagaaagctcagagtttatgaaattatatgcaacttagcttgatgttagtctaatgcccatctcagtgtcttcttgaatgtataacaaagaaaaggtgatttttaaaagttaaaattggttcaggccaagcatgatggcttacatttataatcccagcactttgggaggctgaggcaggtaaatcgcttgagctcacgagttcaagaccagccttgccaatatgatgaaacctcatctctacaaaaaatacaaaaagtagccgagtgtgatgatgtgcgcctgtggtcccagctacttgagaggctcaggtgggaggatggcttgagcccaggtggcagaggttgcagtgagccgagattgcatcactgcactccatcctgggtgaaagccttgtcccaaaaaaaagaaaaaagttaaaattgattcaaagggagttggtgacagctccttatagggtcagtcttggttgcttctctattccctacaatttctatcatgatctcaaataggccactcatatttgtttaaagagttcatgcctgcaatgaatgaatgaataaagatggctttctatcccatttcaagccatacaatatagatgatctgaattactctgctgtcctgcagatttggccttggttcccaaagaccaccccactaatagccccctgattgcttaaaaactcaaaatagccagtgcttttatccagccctacaattctatccacagaaccataagcccgtagaaatatgctaccagcccagcctcccccaaggaggtgtcctgcaaaatgaaaagtatggcattctttaccactttcgggtcaaggggccatctccaaggtcacactaattcatctgctacagacactgtggctgcctttaaaccttgagctagaaaaagcctcctttattctccagtcacctcatctacgcttttcccagcctctccgtggggtcagcagtgaccacttccttgtaccaaactgcactgccccaacagaacaccagcctgatttaccaggatcctcaaagcaagtgttcctttctgtgtgttctttatgcataaaaagaaacaaaatgattcctctgtcaccaaactttgccaatggtttttggggtggtgcatcccactgtggggtccaggaagatcatattctctctggagcatttcaaaatcggactccgccactcgctgtcccacgttctgggagcacttccccacatctgaatgtgtttccttgccccaacttttactttcacttttgctccagctaaataattatataaagaaaaaaatgtagaatttatctttcttttttttcttttttttttttttaccatgtaatttcctttttcgtggtgaactcctacaaagcctcggccgttctcacatttttgtttgaaccaaacataaacgctcttttttataaaataaatcttgctctgtgcttgcttgccaatgtgccctgattgctgattgttctaaaatcactagtctgtcttcccttgtaaaccccctgatgaagacacccagttgtgactcacctagctgtggtcccctgcaaccaggtgcctccaaaatggggctggcgttgacaataaccatttcccagcttttagaaagaggtgacagagctctgttgtagtgtctgagccacaactcaagaaggtaatgagaataaggagccaagatggccgaataggaacagctctggtctacagctcccagcgtgagcgacgcagaagacggtgatttctgcatttccatctgaggtaccgggttcatctctctagggagtgccagacagtgggcgcaggtcagtgggtgcgcgcaccgtgcgcgagccgaagcagggcgaggcattgcctcacttgggaagcgcaaggggtcagggagttccctttccgagtcaaagaaaggggtgacrgacgcacctggaaaatcgggtcactcccacccgaatactgcgcttttccgacgggcttaaaaaacggcgcaccacgagactatatcccacacctggctcggagggtcctacgcccacggagtctcgctkattgctagcacagcagtctgagatcaaactgcaaggcagcagcgaggctgggggaggggagcccgccattgcccaggcttgattaggtaaacaaagcagccgggaagctggaactgggtggagcccaccacagctcaaggaggcctgcctgcctctgtaggctccacctctgggggcagggcacagacaaacaaaaagacagcagtaacctctgcagacttaaatgtccctgtctgacagctttgaagagagcagtggttctcccagcacgcagctgcagatctgagaacgggcagactgcctcctcaagtgggtccctgacccctgacccccgagcagcctaactgggaggcaccccccagcaggggcacactgacacctcacacggcagggtattccaacagacctgcagctgagggtcctgtctgttagaaggaaaactaataaacagaaaggacatccacaccaaaatcccatctgtacatcaccatcatcaaagaccaaaagtagataaaaccacaaagatggggaaaaaacagaacagaaaaactggaagctctaaaatgcagagcgcctctcctcctccaaaggaacgcagttcctcaccagcaacggaacaaagctggatggagaatgactttgacgagctgagagaagaaggcttcagacgatcaaattactctgagctacgggaggacattcaaaccaaaggtaaagaagttgaaaactttgaaaaaaatttagaagaatatataactagaataaccaatgcagagaagtgcttaaaggagctgatggagctgaaaaccaaggctcgagaactacgtgaagaatgcagaagcctcaggagccgatgggatcaactggaagaaagggtatcagtgatggaagatgaaatgaatgaaatgaagcgagaagggaagtttagagaaaaaagaataaaaagaaatgagcaaagcctccaagaaatttgggactatgtgaaaagaccaaatctacgtctgattggtgtacctgaaagtgatggggagaatggaaccaagttggaaaatactctgcaggatattatccaggagaacttccccaatctagcaaggcaggccaacgttcagattcaggaaatacagagaacgccacaaagatactcctcgagaagagcaactccaagacacataattgtcagattcaccaaagttgaaatgaaggaaaaaatgttaagggcagccagagagaaaggtcgggttaccctcaaagggaagcccatcagactaacagcggatctcttggcagaaaccctacaagccagaagagagtgggggccgatattcaacattcttaaagaaaagaattttcaacccagaatttcatatccagccaaactaagcttcataagcgaaggagaaataaaatactttacagacaagcaaatgctgagcgattttgtcaccaccaggcctgccctaaaagagctcctgaaggaagcgctaaacatggaaaggaacaaccggtaccagccgctgcaaaatcatgccaaaatgtaaagaccatcgcgactaggaagaaactgcatcaactaacaagcaaaataatcagctaacatcataatgacaggatcaaattcacacataacaatattaactttaaatgtaaatggactaaatgctccaattaaaagacacagactggcaaattggataaagagtcaagacccatcagtgtgctatattcaggaaacccatctcacatacagagacacacataggctcaaaataaaaggatggaggaagatctaccaagcaaatggaaaacaaaaaaaggcaggggttgcaatcctagtctctgataaaacagactttaaaccaacaaagatcaaaagagacaaagaaggccattacataatggtaaagggatcaattcaacaagaagagctaactatcctacatatatatgcacccaatacaggagcacccagattcataaagcaagtcctgagtgacctacaaagagacttagactcccacacattaataatgggagattttaacaccccattgtcaacattagacagatcaacgagacagaaagtcaacaaggatacccaggaattgaactcagctctgcaccgagcagacctaatagacatctacagaactctccaccccaaatcaacagaatatacatttttttcagcaccacaccacacctattccaaaattgaccacatacttggaagtaaagctctcctcagcaaatgtaaaagaagagaaattataacaaactatctctcagaccacagtgcaatcaaactagaactcaggattaagaatctcactcaaaaccgctcaactgcatggaaactgaacaacctgctcctgaatgactactgggtacataacaaaatgaaggcagaaataaagatgttctttgaaaccaatgagaacaaaggcacaacataccagaatctctgggacgcattcaaagcagtgtgtagagggaaatttatagcactaaatgcccacaagagaaagcaggaaagatccaaaattgacactctaacatcacaattaaaagaactagaaaagcaagagcaaacacattcaaaagctagcagaaggcaagaaataactaagatcagagcagaactgaccttcaaaaaattaatgaatccaggagctggttttttgaaaggatcaacaaaattgatagaccactagcaagactaataaagaaaaaaagagagaagaatctaatagacgcaataaaaaatgataaaggggatatcaccaccgatcccacagaaatacaaactaccatcagagaatactacaaacacctctatgcaaataaactagaaaatctagaggaaatggataaattcctcgacacatacactctcccaagactaaaccaggaagaagttgaatctctgaatagaccaataacaggctctgaaattgtggcaataatcaatagcttaccaaccaaaaagagtccaggaccagatggattcacagctgaattctaccagaggtacaaggaggaactggtaccattccttctgaaactattccaatcaatagaaaaagagggaatcctccctaactcattttatgaggccagcatcattctgataccaaagccaggcagagacacaacaaaaaaagaattttagaccaatatccttgatgaacattgatgcaaaaatcctcaataaaatactggcaaacggaatccagcagcacatcaaaaagcttatccaccatgatcaagtgggcttcatccctgggatgcaaggctgcttcaatatacgcaaatcaataaatctaatccagcatataaacagagccaaagacaaaaaccacatgattatctcaatagatgcagaaaaagcctttgacaaaattcaacaacccttcatgctaaaaactctcaataaattaggtattgatgggatgtatttcaaaataataagagctatctatgacaaacccacagccaatatcatactgaatgggcaaaaactggaagcattccctttgaaaactggcacaagacagggatggcctctctcaccactcctattcaacatagtgttggaagttctggccagggcaattaggcaggagaaggaaataaagggtattcaattaggaaaagaggaagtcaaattgtccctgtttgcagacgacataattgtatatctagaaaaccccattgtctcagcccaaaatctccttaagctgataagcaacttcagcaaagtctcaggatacaaaatcaatgtacaaaaatcacaagcattcttatacaccaacaacagacaaacagagagccaaatcgtgagtgaactcccattcacaattgcttcaaagagaataaaatacctaggaatccaacttacaagggatgtgaaggacctcttcaaggagaactacaaaccactgctcaaggaaataaaagaggatacaaacaaatggaagaacattccatgctcatgggtaggaagaatcaatatcgtgaaaatggccatactgcccaaggtaatttacagattcaatgccatccccatcaagctaccaatgcctttcttcacagaattggaaaaaactactttaaagttcatatggaaccaaaaaagagcccgcatcgccaagtcaatcctaagccaaaaggacaaagctggaggcatcacactacctgacttcaaactatactacaaggctacagtaaccaaaacagcatggtactggtaccaaaacagagatatagatcaatggaacagaacagagccctcagaaataacgccgcatatctacaactatctgatctttgaccaacctgagaaaaacaagcaatggggaaaggattccctatttaataaatggtgctgggaaaactggctagccatatgtagaaagctgaaactggatcccttccttacaccttatacaaaactcaattcaagatggattaaagacttaaacgttagacctaaaaccataaaaaccctagaagaaaacctaggcattaccattcaggacataggcatgggcaaggacttcatgtgtaaaacaccaaaagcaatggcaacaaaagccaaaattgacaaatgggatctaattaaactaaagagcttctgcacagcaaaagaaactaccatcagagtgaacaggcaacctgcaaaattggagaaaattttcgcaacctactcatctgacaaagggctaatatccagaatctacaatgaactcaaacaaatgtacaagaaaaaacaaacaaccccatcaaaaagtgggcgaaggacatgaacagacacttctcaaaagaagacatttatgcagccaaaaaacacatgaaaaaatgctcatcatcactggccatcagagaaatgcaaatcaaaaccacaatgacataccatctcacaccagttagaatggcaatcattaaaaagtcaggaaacaacaggtgctggagaggatgtggagaaataggaacacttttacactgttggtgggactgtaaactagttcaaccattgtggaagtcagtgtggagattcctcagggatctagaactggaaataccatttgacccagccatcccattactgggtatatacccaaagractataaatcatgctgctataaagacacatgcacacgtatgtttattgcggcattattcacaatagcaaagacttggaaccaacccaaatgtccaacaatgatagactggattaagaaaacgtggcacatatacaccatggaatactatgcagccataaaaaatgatgagttcatgtcctttgtagggacatggatgaaattggaaaacatcattctcagtaaactatcgcaagaacaaaaaaccaaacactgcatattctcactcataggtgggaattgaacaatgagaacacatggacacaggaaggggaatatcacactggggactgctgtggggtggggggagggggggagggatagcattgggagatatacctaatgctagatgacgagttagtgggtgcagtgtaccagcatggcacatgtatacatatgtaactaagctgcacaatgtgcacatgtaccctaaaacttaaagtataataaaaaaataaaaataaataaaaaataaataaaaatttaaaaaaagaaggtaatgaaacaaagcattaacattccaaaatggaaggccgggggcggtagctcacacctgtaatctcagcactttgggaggccaaggcgggcagatcacttgaggccaggagttcgagaccagcctggccaacatggtgaaacctcatctctactaaaaatacaaaaagattagccgggtgtggtggggcgcatctgtagttccaagtactctggaggctgaggcaggagaatcgcttgaacccaggaagcagtggttgcagtgagctgaggtcatgcctctgcactcactccagcttgggggacagagcgaaactccgtctcaaaaaaaaaaaaatccataatgaagaatgatccatgtttgcattcatcttgcctctattgaaagacaaaatactgcatttagaggggactgcatcctggggatgagagtaacagctctagtttgtggtgtgcygactccttgcccacgctgcgttaaatgttttgcaggcattacataatttacatgatatataccatcactatctccattctccaggtaaggaaatgaggcaggaggttaggcaacttgcccaagtcacacagctggtgaagggaagggctgcaattccaacccaggccctggggctgcagaacctgacgctgcctctgcaggaacaacaggatcataaccagactccagtgacccaggtcccccaggccccaaggcttggccgcagctggaactgcagagtgcttcatgacatcaaaaaagggcaccaagcaggtccagtttactattaatacattcattcctcatctcaatttacagtctgttttgattcaaatcaatgaacagaagaatgttctgctgtttatcatttgttcattcctacagtcattaccgtcttccccaacaaggcacccatttagtggcataacttctccctgaactgccctagccccaaaagaaaaaggactttgatatcagagttacggatctgctccaagccagcagcacttttctgtgaagcccgtggagcagatatgaaaacctgggcgagatgactccaacctgggttgctatgggaagtctgaggggctgggtgggcaggggctgtggagctgaaacattagaaggggtttgtttctagggtttctaaagctagaaactcctagaaggtttgcagccaggggacaacaaactgtagctatctgggcccgcaaacaccaggagcctggattagagcatttggcaagggaccctttcatttgcagacctcacaatactccgattctttcttgcatgtgagcgagaacaacaccgaggtttgtagaaggaaagctctagaacaaaattcatcccgatgccagaggcttcctcacaatgtgaggagatggcgccccctcgtgtcgagatgatccttcagcacctggaccaggctgagagcggtgaccttgagcactaagcaggtggtggcttcaagatgggcttgacctgcagtggggagaggcctgggccccacagtaggtgaccagttcccacggcttggggtcctccgtctgtcaccttgcagatacaggaggtctatactgcagaccctcctaaagcagctttctctaaagatgcaaaaaaccaccaagctgtttttagatgtgctatttgctgtttttctctagcagatgcgccaagtcctaaagataaacagtttaaaatgatatggattcagtacctggaatcccattgtccatttctatcaacactttttttgttgaaagcctgatcggttccagcccagtgacctccatagattggcatgactcccctaaagccccctttttgtaagtgctagagatccttgctgaaagctgtcaagggcactttcccatcctttgggtttaaacagaaagaccagctacatgtaaaagcccatcaccccaagacaacaagtggctctggtctgctagaaaggattcatgcagttttttaaaatgaactcagaaaagaaaagaacagaaagacaaaattgaagcagaattcactccaagataaataaatacttgaacaatgcaaacatttctcaggtccttctggtgtgacaaaatgtataggggccagacatggtggctcacrtctgtagtccagctcctctggaggctgaggcaggaggatggcttgaacccagrgaggtcgaggctgcaagtgaactgtgatggtgccactgcactccagcccgagggacacagcaagaccctgactcaaaaaaagaaatgcacagggaaattgttattactatcctttgctctgaacaaataccatccttatctgcattctgcagagctaaagaaaattcccccaggttggaggagtctacgttaaagctaagctttggaaggaatttaagaggtaatctgatccaattcctcagtctttcatggatctccttaacttgaggcaattgcctttcatatcagaagctgtgttatcagaaaccacagaggatgtatctcccctttaagggccatagtcattaataagtgacaggatcgtgtcatccttttttttctgattatagtagtgacatatgctcactactatagtgtagtgagcatttttcactgtgtagaaaaacacacagtgtggtttgtaatttttcctcatgtcattaagtactttttatgtcattaaatactttttgaaaatctctgtatctcttttttttttttcagacagggtctcactctgttgctcagactggagtgcagtggcacaatcacagctcactgccaccttgacctcctgggttcaagcaatcctcccctccttagcctcccaagtagctggaactacaggcatgatgtgccaccatgcctggcttttttttttttttttttttttttggtagagatgcggtctcactatgttgcccatgctgatctggaactcctgggctcaagtgattctccctgcctcgaccttccaaagcactgagattataggcttatgcttatagtcctgcatccaaccctgaaaaatctcattttagtggctacataatatgccatttaaaaagccattttcttatgttcagacatgtgtttctagttttttgccgttttaaagctgagtgtggtgagcattttccacattaacactggtccagatttctgactagtatagattggaagcgttctttctgggttaaaggaaaagtcacttttagccgggtgtggtggcacaagcctgtaatcccagcaytttaggaggtggaggggggaatatcgcttaagcccaggagttcaaaaccagcctgggcaacatagtaagaccctcatctctacaaaaagataacagaattagctggcggcatggtggtgcatccctatagtcccagcaactagggaggctgcggtgggaggattgcttgagcctgggaggtttaggctgtagtgaaccattatttcacccctgcactccagcctgagtgacaaagtgagaccctgtcacacaaacaaaaatttattttaagtcactttttttttttgaggtggagtctcactctgtcgcccaggcgggagtgcagtggcacaatctaggctcactgcaacctccgccccgcgggttcaaatgattctcctgtctcagcctcctgagtaactgggattacaggcattcaccaccatacctggctaatttttgtatttttagtagagatggggtttcaccctgctgacgaggctggtctcaaactcctgacctcaggtgatccgcccgcctcggcctcccaaagtgctgggattacaggtgtgaggctttaagtcactttttaagcctttgagtcacttttttaagagcatgtacagtgagggtctgatgccaccacactgctcatttctaccactgcatatggtttctttgtagagaaaataaaacagcgagcaatatttattttgaattgaaggtcagtgtaaacaaaaacatcgagattagatgtccgagttttgccctgtggccttgggcaagtacctttgactccattggcctcaactactaaaatattaaaataactcatttttaaatgatttgagtttgtgcagagagaaagcgcgataactgcagagtgctaagtctcttcacttctttttctttttttgtttttttttttttttttttgagacagggtctcactctgtcacccaggctggagcacagtggtgcgatcttggcttactgcaacctctgcccctcagggttcaagtgattctcccacctcagcctcccaagtagctgggaccatacgcccagctaattttttttttttttttttttgtagatacattgtttcaccatgttgccgaggctggtcttgaactcctgagttcaagcccatctgcccacctcagcctcccaaagtacttagattgcaggtgtgagccacagcgcccggcctcttcccttataggatacaactttttgttcctttccaaatgctctgttcttgcatagcagagggtgtggcagtgtcacagctgggaagtttctgccagttccctccacatgggagtttgcacatggcgccctggcctgacatcacagtgatttgcctacaggcacccagaaatccaagagcaggcaggagggaggtgtggatgcagtgttatcaggcttcagggcttctgtgtttctccctttgcccmcaccactaaaatacaggctagcttcaaaatcccattccagaaacacatcctgaatgattcacttattctttcaaccatagagatggaaagagatgggacttggtgcaggtgyctgggtttgagatgcaaattgccatttcctagacaagctgcgtaagcaggatccaaaacgttttcaccatctataaaatgggggaataccaagcccatctacatctygagtcatcctaaaactcaaaataaaaatgaaaccatatatgtgcaaccagttaacaaatcctaaaattgaaatgaccataaaccactattttggagatgtgcaagtggctggaaattattctagatatgaaagaaagtgtgtcttaatatgtttagaagattcagaattgtttaaaatgtcaaaaagttgggggcagggcaccaagcgcggcggctcacacctgtaatctcagcactytgagaggccgaggtgggtggatctggaagccaggagtttgagatcatccttgggtaaatacaaaataaacagagggyatttctctgctgctgtgcaaccttacagtttacttataattaattttttttccttttttctccttataattaattttccatgcagcttttcaattttctctcaccaagttgtgtcagttttggaaatctatttcaaaatttttctagatataaaaaaagatgcttagaagattcagaattgtttaaaatggcaaaaaaaaaaaaagtgggggttggtggtgccaagcaaggtggctcacacctataatcccagcactttgggaggccaaggcaggaggatcgcttgagctcaggagttcgagaccagcttgggcaacatggcaaaaacctgtgtctacaaaatacaaaattagctgggtgtggctgtgtgcacatgtagtcccagctactcaggaggctgaggtgggagrattgcttgagcctgggaggctgaggctgtactcagccatgactgtgccactgcactttagcctgggcaacagagtgaggccctatctcaaaaaataagcaaataaataaaataaaatggcaaaaaaaaaaacaaaaagcagaaaccatctgaattatattcagagtctagagtttcccaagtatagttgaccctagaactttttatttgtattacatctgttaacacccacacttcagaaaacacaggttttgcagtttaatttctcatagaatataaagtttataaaggtaggcactgtgtcttgtatcctgttgtagcctcagtgaatagaacagctggctacatgtaatagctgctcaataaattgtgttaaataatgtgttgaatacttttcattaggcttatttgaaaatagtctctgaaagtttgcagagtagagtgaaacaagggttttcatgtgctgctacggaaagtataaattggttaaaattttgaaaagcagcttggcctcatgcatcagaggctcttagagtactcatattctctcaccaagttgtgtaaattctggaaatctattcggaaattttcctaaatatgaaaaaaaaaaatgactggrcatggtggtgtgcacctgtagtcccaactacttgggaggctgaggtagaaggattgctttagtccaggagctctcagctgtagtgcaccatgccggtcaggtgtccacactaaattaagcatcaatatggtgacctcccaggagcaggggaccacaaggttgcctaaggagaggtgaaccagccaagtcagaaacagagtaggtccaaactaccatttttaggccgggcatggtagctcatgcctgtaatcccagcactttgggaggccaaggtgggcagatcacctgaggtcaggagttcaagaccagcctggccaatatggcgaaaccccatctctactaaaaatacaaaaactagctgggtgtggtggcatgcacctgtaatcccagctactctagaggctgagataggagaatagcttgaaaccaggaggcagaggttgcagtgagtcaagattgggccactgcactccagcctcaaagacagagcgagactccatcccaaaaaataaataaataaataaatataaaaataaaataaaactcccatgctgatcattagtgggaatcatgcctgtgaatagccactgtactccagggcaaaagagccaacaccatttcttttttttwwwaaaaaaaaaaaagaaggctgggcacagtggctcatgcctgtaatctcagcactttgggaggccaaggcgggtggatcacctgaggtcaggagttcaagaccaacctggccaatatggtgaaaccctgtctctactaaaaatacaaaaaaattatctgggaatggtgtcacatgcttgtaatcccagctacttgggaggctgaggcaggagagtcgcttgaacaacaagagcgaaactccatctcaaaaaaaaaaaaaaagaaagaagagaaatatatgtctaaatatgcttagaagattcagtattgtttaaaatagcaaaaagaaaaaaggaaatcatctgaattatgttcaaaaatcatagaataattaagttgcagaatattcacttgatggactaccctgcagccattaaaatgatacttagaaacttttataatttggaaatatgcttatattataagcatgaatgcataactcatatgtaattttgcatccttttctttcttgcattaaagaaaatggcaaaataccaaactgtataaagattgttaatctgcatgtataataaaagcaaacaaaataaagagctaacataaccgggtgtggtggcgtgcacttgtagtcccagctacttgggaagctgaggtgggaagactgcttgagcccaggagttggagacaagtctgagcaacatagtgagaccctcatctctaaaataaaaaaaaatgttgtattagccaggcttggtagcatgtgtctgtaggcccagctactggggaggctaaggtggaaggattgcttgagcctaggaggtcaaggttgcagtgagtcgtgatcacacaactgcactccagcctggtgacagagcaaggcattgtctcaaaaaaaaaaaaaaaagactaaattaataagcaccactctctcaggcaattgttctaagcactttacatgtatacctttttgtttcttctaatgacctataggcagatactattataatacccattttatagataataaactgaagcacagagaagttatataattgggccaaggaactgattgggattcaggccagggtagttcaggccacagcctaaacaaatattgagaaacaagacaccaaaatatttacaacaattgcctccgagtggaagaaaagaggacaattactttctttatctttctctacgttttaaaaagtttttagggggttgggtgtggtggctcacacctctaasctttgggaggctgaggcaggcggatcgcttgaggtcaggagttcaagaccagcctggccaacatggcaaaaccccatctctactaaaaagagaaaaattagccgggtgtkgttgtgtacacctgcagtcccagctactcgggaggctgaggcaggagaaccgcttgaactcaggaggcagaggttgtagtgagctgagatcacgccactgcactccagcctgggtgacaaagcgagactctgtctcaaaaaataaaaattgtaataatgagaaaactgctctctaaaagggcaaaatagtgaattaacgtgtttctataataaatctgagcagagaatttttcttttaagttgattacagaacccccactattacaaccaggaatactgacccttgctctgccagccagtctcttctctgacagaggagaaaattcgaccaagttctatttagagagaatgggttgaagataggttgtttttatggatgcagacaaactatatccaaggctagtayccagttctcagtttcaatatcaaatttgctcaaacccgggttctcctattttaggcctgatgctcagatagccactctgccctagccagaatcaagaatctaggtaccagaatcccatatgccctcacaaaccaacagctcagttctatactcaggtgagatgggggagaggggaggggaatggagggccacagggattctttgcttttgcttggccaaactttagtgagacttctgaaccttctcgtagtcctatctatgcacctccttgtaaagtccagttttagcaaaactgctaagtcagtttagccagaacccccaatcttcgacaaccgatcatctttgatatctgatcagggtcttcatccttcaccatcccccaggtgatgtctgatcacyctggcctgtcttctacaagattcctctaggtcattttagccagaatccctcttaccccagtttcctctaagtaattttctatccactgacccccgcactgctccttggccataaattcccatttgcccattctgctttcggagttgagcccaatctctctgcccactcccagaccctgttgcactggtcctatacccatcgctatggtcctgaataaagtcttccttatcatgctttaataagcatcactgaataattctttatttaacaatgggtagtcatggcccargtaagagagacgtggtgtccgctcctggagctgcaaggctcctgggggctttttgttttgttttggttttgtctttgtatgcaacgtgagaaaaagccattgatgcaggctttagcatgctgggaaggaagtgtaaagaagccagtgacgctggtaataactgtgaaatggaacaaatgccaccatatttatctaaatgtaaattttaaaactggggacagcaaatccattctacagtgagcgccgcttggccagtaacaatgacttcattttcagatgcagtcgaagccctgtggctccaccccgagggtccagcccttaccactgctaagaactacaactcccagcccgagggaggtctctgcgcctgcggcctgacgccctacgcctacacttcccagagaacctagcggttacgccaacgcgcgcgtgcgcccttgcgcgtttctctcttcccactcgggtttgacctacagccgcccgggagaagatggctgccccagcagtgtccgggctctcccggcaggtgagagaaaggtggtcctgagagccagtgggaggatccctcctgggatgaccggtaccaaacctcgagcaccagggtgcgatgcttcggctggggaagtctggcagtcttcaaggttatgggacctggcgagtgggagcgactcaggacgacccagcgtttgtcccccgggatgcctacggggcagtaggcgcggggctgcgcgtgccgtaaccttggcgtcttccgagcacagcccctggaagctgctagcctgaggggcgcaggagagggggtctgcccttcgctgaattccggggaaggggcatggactagcccccaaatcagcttcctttgccattgtggtaaaacctgtcagagatcacttactagtaatgctaaggaatatttgtaaaacacatttcacagttttataaataaaatgaggccgaaaagtttaaatgagtctttggctgctcagtcagtaagtggtagaattgagatttgaacccacggaatcacccagaagatcgagtttgaaaaaatgttatgctgtttgtgctgcatctcaccatggtgctttacatatcatgaccccttcctggcatcttaggtaattttttcataagcattaaaaagtcttaatcctcacaagcagttttgataaaacacgttccatagctggagtatttgaaggtgacctgtgatctgtgacctgtgcgcttgcaggtgatttttaaactgtgtattccagctctgtcttttgatgggcagratagtgtctctcagaactaaggcttcttgtcagatcaaactctgcggcagtactcaaaaaattcatctttattttcagatagcatttgcattccgaggagggtacgtctgttgcaaatgatctgctcaagggtctgttaatagaaacgccaaaattttggttaaatatttttgaaacatgcactccttggaagttagtgtttttctgtcttacgggtatgctagcctcggtccattcctagcaaactaggaggttcgtgggaaggtgatttcccaagcrayttggcataatcctcattgggtaagtttaccccttagtaatagtaagtagctcaccctcatgtaatatgtgaatatacaaagagacaaaagtaatgattttaaggttatttaaaattttttgttgttattgagttaaatgcagaaatccttcaagtaattttgtttgatctattttcctttattgctttgaaggtgcgatgcttcagtacctctgtggtcagaccatttgccaagcttgtgagggtatgttaatttatattcttctgtaatgataaagtacgcgaaagtgtgagtcaaacagcagtacagtcagggcgtggatttttgtgtagttactatctaaacctttttgcgtgacttgtggttcccaaaatgtgctgtgtgcatagggtggggaaaggaatggtgttgagtatttgctttttgacaggcccatgcataatctttaaatatgaaaactttttaatcatttgtttttccattaaccctctaaaataggcaagctagcatttacttactttttttttttaatgaaagaaacaggtttaacaaagtgacatgcccaagttatcacaggaagttattacaggagacgatattaaaatcaaggtaccgggctgggcgcggtggctcacgcctgtagtcccagcactttgggaggccgaggtgggcagatcacgaggtcaggagtttgakaccagcctggccgacatgatgaaaccccatctctactaagcatacaaagattagccaggcatagtggcgcatgcctataatcccagccactcgggaggctgaggtaggagaattgcttgagcccgggaggcggaggttgtagtgagcagagatcatgccactgcactccagcctgggcaatagaccaagactctgtctcgaaaaaaaaaaaatatcaaggtacctgggtttctaatgcagttctccatgttccattctggtgagaaatattcatactcttcacaccctttcttyccagtaggcaccaaggaggctcactatttcagggagttgccagtccctttcttttcaaaccagaagtaatccagttgaccccggataaagaggactattagtgacacataataaatgaagttccccagaaggccccctgaaatgatacatggctaacagctggaaacaaccctgttggaacatgaagtctgattccatttctatgggttattttgaaattctttatttgattaaagaaagttcctgtgtgatagagaattggttcaactgtcaaggagcaggaacttttctaagatgtgctgggcagactatactacccacgcttttccccaccaaatcaacagtgagccagtccgccccttggaaaaatcgtgtaaaggaaagatgatcataccaggtctgtgtccttaatgagcccacgtcaggtggaatttaggaagataattatcctgtcccgtcctcattaccagccctaaatctcaaatcaaatgatcaaaatcatttcrtccttcatgtgagaccttaaaacttcataacagtgttaaggagtaactggtcttcccattttacaaaaggggaaactgaggccctgggaaaatttacctgaggttactcagcttagtcctagagctggactggaactaaatctttctcatccaagcctgagctttcccactacaaccatacagcaccactaagaacatgtagtcatacattgatggtagaaaaaaagtctrtagtttattgtgaaaaataattcaagcatcaggtttttttgtaaactgccaaagggctctgttacactgaacatcgatagggaggctatgtaagggaaaatgtgtagtgttagtatgaaatgtataaaagtatacttgtgtgtttcataaacacctgttttcctagctctaacatactcgaaactgtctatcagtgttcacaacctcccatacttgaaactaaatagttactgagttcaaaggaaacataagcttatctcaaaattaaagtacaagtaattgataaaggtatgtaaacctggaagggactttagacaatgcctactaagcccctcattttacagatgaggaattggaggctcaaagattgagtgacctgaccaaggaaacatcgctaatttatttgcaaattgccatttaggacagctcttgaatgacatatttaaactgttttgtgttaaagagatacattttttaaaatataaattttaaattctgctcttgagagtatactattaactgattttcctttttcyttcctctcctatttcaccttttttttaaagcctcctgttcaggtatacggtattgaaggtcgctatgccacagctctttattctgctgcatcaaaacagaataagctggagcaagtagaaaaggagttgttgagagtagcagtaagtagctttcctattcattacatatgaagttcctgtttgtatattttttcctttggttgtttgtgcattcctaatgaggtgtatcctrcaagaaaaaactgggaaaaagccattgtctgtaaacacatttttagtaataatattgggtttttattataagacatataaaaagaacaaacagatacatataaggatattaatattaggaaccaagattaggggctaagaaaaggtagaaatataagattaaaatggatggtaatttaggaaaattgctatttcagaagagaatttaaaagctacctttaaaaatctatgcttataactgggcacagtgctcacgcctgtaatcccagtactttgggaggctgaggcaggcagatcaggaggtcatgagttcaagaccagcctagctgacatagtgaaaccccatctctactaaaaaatacaaaaaattagcgggacgtggtagtgaacacctgtaatcccagctactccggaggctgaggcagaattgcttgaacctgggaagccgaggttgcagtgagccgagatcgcgccattgcactccagccccggacggtacgagactccgtctcaaaaaaaaaaaaaaaaaaaaaaaacctatgcttatgggctaggtgtttagaatatattgtgatttggttttactgagaatttgttttcatgaaaccttttcctcaggttttaattgccatattctatgcttgtagaatcagaggaggctcagatatgtcttacaggttgttttcatttggtagagatgcctttgcaattgccagaaccccagaagtaaccatgtagaccttttcattgttttggtaaacctcttaattattttgttcccaaaatgtgagggaagaataacagggtggggcgcgctgggcagcagagttagtaaaggggcatgggcttcccagtagtagtagaggactgacaggcaaagactgtgaggctgctgcaagatgttttttacttttttttttaaacatgaaaagcagaataaataaaccrtattaccagaagcctacattgtaactgaataggagaatgtctgctttcgttttcaccgaattttctagttaacaagtttctacacattctgttgcttccttcgattttctagcgccaccactggcagtaaggtctgcattaaaaaaggtgagggagacgcagtctggtatatagcctcttcagaggaagtttggttttttcttcattttaagattcttcattctttaattcacatatctgcaagtttttattgtttagaaaaaacaattcatagrccagttgtatagagtaataatacttacgttctatattaatcatcgtatgtatagtctataagtattactgttctgtactgtttatgttttattcatttttcacttgagcttctattggaacttccgtcttaacaggcagaataattttagctccatattccttccttgatccatttatctctgcagataatgcttaaggtcttagctggtgtgataaactcttatgattctctcagagcccaggagcccagccctgttgttggagacatttgggggaagggcatgcaggaacagacggggtctcacacaggcatttttggaggtgatggttattgtctgctacttgtcagttatgcccattttaaacggaaacaatcatgtttacaatggagagaattacttggattgtggatattagaatagagtttgtctaaagcctggmagtcagtcgagacatggagaaaaagggaggcaattaccttaagacactgaatattagcagggttttggcactaagagggaaggatgatacaaggatacgcactgtcctctggatgatgcaggagacacagataaacatgaaaaactaggtaacccaaattccagaatgctttaaatctgtatattcctgcattttttatggaaaaatgtcatttctgtggggtcactcaagtggaaatgttagcattggatgatagtatctgaccagtatcctggatcagaggcaggattctggccaggagcctgggaggaggtgctaggagcgtaattgaaaagcatagagaggtgtgttaactgaaggtgctcaactggaaactgctgttcgtttgttggaactctggagcaacatgctggaagctgcacttggtcactgaattcagacactgtgatacaacaaaatgagaagaacgttgtttcccatgatggttgtgctcctgttttattgtccactctgtctcccagactctttggggccgctctggcagcaccagaggcctcacagaatctgctgggttccctggactctgtaagaggcagggcccctccaagggagcggtgcggaggcctctgtggtcagagcacagttgtgaggtctgcactctagaaatagcactgctagaaaaccagacgactcctctcttaaatatattaaagtatgcagtctaatgaaggtttggctgtttagtgttttataatctttcttgaaaagcaaaaacaaatttaagaaagttcgtacagtatttttaaatttttttgaggaacatcattctatataaaatcctggtgcagtgcacagtgtattctgaaaggcagtcagaaaattgtttgattataatctttttttcatatgttcttcggcagtgctaatttaattcataaaatatttaattcataagaaagtgtttgtatggccgggcacagtggctcatgcctgtaatcgcagcactttgggaggccgaggtgggtggatcactcgaggtcaggagtttaagaccagcctggtcaacatggcgaaaccccgtttctactaaaaatacaaaaattagcgggacatggtggtgcagctattcgggaggctgaggcaggataatcgcttgaacccgggatgtggaggttgtgtgagccaagattgcgccactgcactccagcctgagcgacggagcaagacgttgtctccaaaaaagaaagaaagaaagtgtgtgcatggcacatccttcatttgtgctctaaaaaatttaagaaattattttttgatgctttcagcaaatcctgaaggaacccaaagtggctgcttctgttttgaatccctatgtgaagcgttccattaaagtgaaaagcctaaatgacatcacagcaaragagaggttctctcccctcactaccaayctgatcagtgagtattagaactttttcatttgaggtgtcttgaaactatgactggaaatgtggtccatggactgtgggcggcatcagcatcacctgggagcctgttggcagtgaagaatctcaggcctcacagcaacctgctgaatcagagtctgtatcttaaccagctccctaagtgaatcgtttgcacattgaagtgtgaggagcatygtctaaaggatactaggacctaagcatgtctaattgtatagtcagtagtttcaactgtggaggcggccartgtgatacctaccaagaaaatggttcgtggcctgtggctataccttgatccttggatacatttgcattcttgggtacatttggactgcttttctctttttgagacagagtcttactctgtcactcaggctggagtgcagtggcacgatctcagctcactgcagcctcaacctcccagactcaggtgatcctcccacctcagcctccctagtagctgggaatacaggtgcatgccaccacacccagctaattttttgtattttttgtagagatggggtttctccatgttgcccagcctggtcttgaactcctgggctcaagccatctgcctgctttggcttcccaaagtgttggggttacaggcatgagccaccatgcagcctggattgcttttcagatcctcatagccagctcaaaataaaagttgcagagaaagtgtgttcatgatatcatctttgaatttgtagccaaacatacaatctgyaacataaatatgaaaatcagattgcaagctgagaaccccccatacctactaatttaaatccttgtcagtgcagtctatttwaaaaaaaaaaaattggatatgcgttttaaataacaagttgtatcttctccattctttttttttttttttttttttgagcctgggtgtccctttctgtcacccaagctggagtgcagtggcacagtctcagctcactgcaacctctgcctcctgggcttaagtgatccttctgcctcagcctcctgagtagctggaactgcgcgcatgcgccactaatttttgagtgcccagctaattttttagttttttttttgtgaggcagggtttcaccatgttacccagggtttcacccatgttactcctggacgcaagctstctgcccatctcggccayccaaagtgctgggattacaggcatgagccactgcacttggcctccattcacattgttaaagaacattgaatatactgtgattttaagagacaagatcttgctctgtcgcccaggctggggtgcagtaggacagtcatagcacactgcagccttaaactcctaggctcaagcaatcttcctgcctcagcctcctgagtagctgggactatagacatgcaccaccaagccctaacgtttttttgtagagatgggatctcactattttggctggtcttgaactcatggccccaagcaatctttgcacctcagcctccagtagttgggattataggcatgcgcccctgtatatggtgttttaaggccacaaatctaagtttgttttttgggttgagtatacaacttcatgaataacttgttcaggtgagtttcttgttactgagacaccttcactctggcagatttgcttgctgaaaatggtcgattaagcaatacccaaggagtcgtttctgccttttytaccatgatgagtgtccatcgcggagaggtaccttgcacagtgacctctgcatctgtaagtaacgggttgttgctgctgtgtttgccttgatattacatgtgtcaccttttgcaggaagaaaagggaaaaacagggtaaaatcaagaaattgggaaaggtaacttgtcacctgggatgtttgtttcatttttatatcagcttctgtgaccctttgctttggaaaagccagcgtgtatcttattagtgcttctgtaaccagtgattattcataaggcctgggttaaatgtaaagtacatcaaaatgtgttggaaaagagtggtttagactctattatacgtttgaattattttrtgaataccacttgaagtagtttcctgaaactagaattctagagtttatttttttgagacagagtctcactttgtcacccaggctagagtgcagtgacacagtcacacctctgtagcctcaacctcctgggctcaggtgatcctcctgcctcagcttcctgagtagctgggattacagtgcacccccaccacacccggctaatttttgtgtgttttttatagtgatggaggttttactgtgttctccaggcttgtctcgaacttctgggctcaagtgacccacctgccttggcctcctaaagtgctgggaataaaggtgtaagctaccacacctggcctgaaactagagttactaacctttcatctttggtggtggtgagtgggaaggagtagagccgttgggcctttgtatctttttgacttgatagtgggctataattggctaccgtttattgaaccctactatatgctgggtgctttattatgttattcagtatcaaaagattcatgtgagatagaagtataattaacctcattttacagatgaggaaaccgaatgcagggagatgaagtcgcttgcccaaagtcatacgaggtgggactagaatttgaacacaggcctcaaggcctcttagaagtccattttccttagactacactacattgcctccctagaattaattttgttgttgtcttcaatatgtattttcttccctatgtaactcagtcaaatgtagtgtagcttaccctacaggaaaacaggggagtgtggtagattgacttggaattcgtagcacctgacctcatctagattaatagatgtagcatttaaaggacagtctaaccttctagttagcacagattcaaggagaggcatcctagcacatcatacttacttgcacgtttgtagttcagtagttggtgcccccaaaacatgtgcctggctgcaaatcattacagctcagacataggcagggagccctctgtggctgcatcagttatccctaacagtgtggcacagattagacattcacctgccccacggtcacccatcatgaagcactggtgcaggccattcttcagtgaacacaaggacatgattttcttttttttttttttttttttcttttttgagactgagtctcactctgtcacccaggctggagtgcagtggcaygatcttagctcactgcaacttccgcctcccaggttcaagcaattctcctgcctcagcctcccaagtagctggactacagcacctgccaccacacccggctaatttagtgtatttttagtagagatggagtttcaccatgttggccaggctggtctcgaactcctgacttcagccaatccacccaccttggcctcccaatgtgctgggaccacaggtgtgagccaccgtgcacagccacaaggccatgattttcttttaaaggatgcttgtttttgcaaaagattttagaaccaactgttactaatgcttttgatgttgatactgttgggtgcgtgagtctgtactgtttgaaaaacgttatgtcttgatgagtgactaagagcacaggctttagaaatacacagactggtttcaaatattggggctggtcctcacctgctgatgtggccttaggtgagtttcttacccaccctgagcctccgttccctcatatgtaaaatgggcataatgaccggtggcctttcagggttgcccacatgaagggagatagtaggcatgaaatgtgcctggcatagacaggtacctggcagttggtacatgtctcagtggagggtatgtatatttcagaattctgtaaccttttagtctcagtaaatcatgttttgaacacgaatagattctggccaccaccagcaccccccacccccaaaaaaaggatattgttatatctttacaaagacataaatttttctgccaaatttttttaggctcttagaggaggggccagggaggtaggatttatgacaagttaaaaaaaggcctttttagcagggtgtggtggctcacacttgtaaccccagcattttgggagactgcagcgggtggatcactcaaggccaggagttcgagaccagtctgaccagcatggtgaaaccccgtctctactaaaaatacaaaaattagccgggtgtgatggcatgcgcctgtaattccagctacttgggaagctgaggcaggagaatcacttgaacctgggaggcggaggctacagtaagccgagatctcgccactctactccagcctgggtgacrgagcgagactcggtctcaaaaaaaaggcctttggtttaacagccttcttcattttcaccattagaacacttaacactataacataactaaccaggagtaagagttggggccgagaggagagtgcagtctggacatttgaggtgcttgctctaaagtaggttatggagctgagctgacttcaggaaaagccaactgctccaggttctctcactggggttcagagagtggagtggcctgccagagctccaggtagctgtggatgcggggagatgaacagccagcagagctaggcaaacatgaagatgtaaaaccaggttaaaatggcaacttttcagccaaggacatgatagatgcatgtcgtgtccccagggctgcacccaggagaggcctgtgtcctcctgcattgatggggctgcatcttcaggcattagaaacttgaaggcctttccttgttagttccaagttgtactgctagcacacagagcagaggcagggagggagtggcatttacaggccgtccttgaacggctgagtgggagctgcccgggtgatgctgtgaggcagggccttcctgtgctccctgaacctccagcgtgaacaaggagtgaatgctgcagagcagctccatgatgggcccaggtagcaaagggaggagctcacaaggcctgtcttggtgatgtgggcctggggtattttaactctggaagtttctgttttgctttatctaaattgaaaggatggttttgcctttcagcctttagaagaagccacactctctgaattaaaaactgtcctcaagagcttcctaartcaaggccaaktattgaaattggaggctaaggtaggttttaaattatttatggtacgtttyctcgggttattttaagcttaaaatggctacagaaagtactagtgaaatattagatctaactctatactaatttttctgtagttaaaattttgtatttattttaaatttaaatgattatctgactgtgcagttttacttttgcctttttctaggtgtaattataacctcttacatttgtgcaacacatttagcctttcaaaacacttttttgtgtgtcccatttgattagcgcgttttcacatttccagtcttacttcttttgtagactgatccgtcaatcttgggtggaatgattgtgcgcattggcgagaaatatgttgacatgtctgtcaagaccaagattcagaagctgggcagggctatgcgggagattgtctaaaagtgttggttttctgccatcagtgaaaattcttaaacttggagcaacaataaaaagcttccagaacagatcatattatgttcactgtcttttaaactggaatgtagaaggctttatttttatgtccttttttggtatcccctgagtataaaggccaaaaagcccttttggcctagagaatttggtttgagtagattatgtttaggaattaattggttagacacagcacctaacacatggtcactcagcaaagtctatctggtcctgcctgccaaaatcccgtgtctttaagggtttgttcagagttcctggtccctactagatcatcggatctgtgtttgatccatagccctccagggaggcctcttgcccttgatcctaacatgaacacacctagttgtaggctgctctgtagctttcaaggccatttcatgtacatctgaagctgcatgacagccttgtcacacgggtgggagagacatcaccccactttacaaatgaggaaagagattgaggggccctagagatgtgctcagagtcacctgtctggacagctggtgtcaggccctacagcccatgtttttaccactgtataactaacaccatgcgccgacacgttgctggagcaaacgggcaaaagttaccttaggtaggtcccctgccccttcccgctttgtccctaagatgctcccaattcaccttttaaccaaaamcagttcccaggtcagctcttccactacattttaccttttggtcttctagagaaaatagttacagagttccccacgcaacagcccgctcaggtgcctgttccttagtcaacctccaagaacttttggccaacaaaccagttcccttcccagaaccacccctggttgggcagaggcaggaccattgcagcaaagaagtcctacagagcaatgacatggcccagcgctgctccctatgtgctagtgctgggactggcgtgccctccatgtggcacaacactcctgacactcatgcttggcttcaactccagcttcctcctggcaaagcttttaatacatgatcacctaatgtgacaaccaacggagacaccacgtggcccctcagcctttccaggaaccaggagtgctgaggcccctcaacctttccaggaaccaggagtgctgaggcccctcaacctttccaggaaccaggagtgctgaggctgctggctggcccgaagaccattcagccaccttttaggtgggcctagggctactcagctagagaccacattcttgagcctctggcagcacctgaccttggtgctgagttctggcaaatgggaaaggrgaggaagcgaggtgtgccttcctggactgccctcttgagcaatccttagtccatccctctagctagatgcagacaagatggcaagcgatgccaagggcagagccaccctgccaagccttactgctgcccctgggctgttaaacacgatgaagaaatagacctctcttcaaagccacgggatattgagttctgtctccgcagctgagtctgcaacctaaccatgaccacaktccaggttcccccagactcactgcctgcctcctgcctgcagtgaggcctgctctgcagaaggtggcgtcatacacacaatcacagctcctacagacatgtgactgccaatggacaaaccgtctttgcgggagcctcatgctgctgatgctgcccagatccttcagagtcaaactcagcaagcttcctgttgatcaagcacatacaatcttggggaatgatgaggcccttcatatgtcgccttacgaggtcaccagagagaacctagagatctatgtacaatgatttgttttgttttttgagacagtctcacgccatcactcaggctggagtgcagtggcacgaccatggctcactgcaacctcaacctcctgggctcaaaccatcctcccacctcagctgaaactacaggcagtgaaactagaggcagtgcgaccacacccagctagttttcatatttatagtagagacaggatcttgccatgatgctcaggctggctttaaactcctgggctcaagtgatcactggcctcagcctcccaaagtgctgggattataggcttgagccaccacacccagcctacaatgattttcttcacagtatttttttaaaatcaaggtgaaagttttacagtcccttgtatatgggatattttcgatgcatattagctattaaatagtacaagaggccgagcgcagccagggtgacaagagcaagactccgtctcataaataaataaatagtacaagagtatttaaaatgcacacacacacaaaaaatacagaaatgaagtgcatcaaaacctttatttttgtgtagaagaacatctccattaagtgattttatttcctttgtgtttttctttccttgctgaattttctgcattaacaagtattacttctgtaacaagaagaaaaactaaatatttgagaataaaaagtattgccttgattatgctggctactaaccgtggttaaataggtaataattacatgttttgtactagtgattccatccactctctggtctgtgtgagggggccctcatcagacttggagagaactaggtatagttgggaaagttaattattgcatttgtttttaatggcatttaactttttatttttaagacagggtctcactctgtcacccagactggagtgcagtggcacgatcatggctcactgcagccttggcctcctggactcaagagatcctcctgcctcagcctcccaaatacccgggaccatgagcatgtgccaccatgcctggctgatttattttttgtaaagacaaggtctcactatgttgctcaggctggtcttgaacttctggatgcaagcaatcctcctgcctcagcctcccaaagcactgggattacaggtgtgagccaccacatccagccttaacttatttttaaaacttcaaataacaaccaagaaaagggcatacgattttatgttcttcaaaaatggggcatactagttttaaaaaggcaaagacatactgctgtagggtcaactttttaaaaatgtgctatgtcacaattcaactagtgtccaagccagctagagaatttaaaggacttatttatagtcagttaaatcagtgatgaaataggtaggaatggccttaaaaccagaacaggaggaaacaacctaatacaattcagcgttgggttttatggaacgcagaattatagatcacccaagtgctgaacacgtggagttacgtgtgttagaaacttcttcctggaaattcagcgacccttctgaatgtctttataagaaaatcagctttttgcaccgccctctcaaccccaccctcagaatttcttatgctgtacaacacaaaacttctcctgttctcacaaagacttcgtacacagaaatctatttctgcttggtgttagctaacatttatctgaagccgcaggacagctgaaagggttgttggttggttttgttttctaggtttatttctgcacaattttccttgcacagctacaatcttatctgtgggaagaggaagagacaccatttgcagggctgttagcttcctgtgctctcagaaaagagtgaagcagaaagaacccaaaataatccactataacagattggcttttctccttttattcatgaactatttgaatttaaaccacacaggtcaaaatgaccaaagagttgttttttgtttttgtttttgtttttgaagagattgttctttttaggttcaagatacacaggaagagcaatttgtactgatgttgctactggtttaaagaaaggtctcagttaccatcatcttaatcggtaaaatttaacatttcacacataataagttgccaaaggaacactcaaacagcaaaaacaaacctcagcttctttcaaacaaaaaagaagaaacaatgttttggccctgcttcatcaaacctttagacaaatacgtaagtctacaatttataatagtgtctagtaattcttagaattccattaacattacatatcagacaatatagtctctcttttatggaaaattaaacagtaccattatttggcaacagaagtatattacaatcaacagcacatccatcaaggggcgggcctggtcctacccctgggcagggctgtgagggaagcaacatgccaccagcactgtggcccgcttgtcactggaagcacaaggagctcacgttctgatggattacattcttttccaaacaggcaaaggctatctgggagggttcgctagcactcctgggaagggagggccccatgttctagcttttcttgtccccagacttttttgaaacaaccaaggcccaagggacagttgactggctgacttgtttccactcacagccctcttgccaccccagccagagggcatcgttctaaggaaggagagtcagggcctgtttggggttggtagaccagagctcatctcctctgctggcaggccttaggtggccttccaaggctgcgcctgaacaaagaaatctctgaacagctccatctttgggaataaagccagttatggaccacatggacagtgcctctaagtgatttgcagattattcatgcacctaaatagattccaggaagcttccagaaatcacagcttcccatactcctgaagtcagcagctttactggttcgggcctctcaaaaaaggggctccagttgctggttgacagcattaagatgcacgcagcctgttcaaagaaatgttgaaaacctaacacattcttcagatgtcttttcagaccacaggccctcaaccttccaccagcggtgtcacccccaaacacaatgcattcagatcaccagaaaccagctctttttgttactgcagtatttccaggctgccaggggaggctggactcctggggttgccccctcctgaaatcatttctgaatgcctttctcaggggtttagacattgagtttcacagaatcctccttaggtggcctaaggggcacttctggtggccaagtacagaaagtctgtgccccagaagcagcctggacttctgatccttttctgggaatgcagacgggaggaaggcatcttccccctggggtctccatggaaacatgggcatccagaagcctgccccaaaacggcttaactcagaaaccctaaaccatccatccacccacctggctatgcaacagttgaagacagtgaggatgcatcaggaaatttcatggaaaacgcaaacgctaattagggataaactgaatcaatccagatacagaagtagaaagggcgacctggaagtcagagagtggcctctctagtgggatagctgcgtcagccccagatccctaacaaatccactagaacccaaggaagcctgcgtggcacatggatctgatgaaaaacaggctccctatcctctcatccttcctgacacaagtaccctctcagatatgtgatctgcaaaaatccatttttaatgcaacaccaaggtcccatgcgaggtcatagctacaggatacttttcatttgatcacgccaccatccattacactgaaatttatcatatttcctgcaggaaaaaaaatgactcatttgatttctaacatatacaacttggaatttttttttaatataagaaatttagttgagttgaacccaagtaatctcattaagcattttctactcttggaataggttttaaatttttttctatagttttatgcacttaaattagattcctaaaatactctcatatacatacagaaaaataatctctcaatgacaaatcacattttacaataacaagttaaatatttttgactacagaatctgtgttagtttatgcaacatttaacagcatggcctcttacataccatatatacatttagtcatggccattccataaacatacagcagagatttcatgaggaacatgaaatgaatacaaccttttccctttatatagtgggagttcgcctttttcttagctggaaacagcacagaatgtagaaaaccggaaactgagctgattatcatccacaggacatttttgttgcagttr

SEQ ID NO: 94553 - DNA, 23207 bp, Homo sapiens
tcttctgtgcactctgctttctctgttccatcaatctcaatttctatcagctcctctgcttctcttttagtcatggctggagtatttcaaaggatcagtcctgcaagagtgactttttaagatattttaaaactatccacataaacgaaatgacacacaagaagtagagacccaatccaaataaaaagcaaacgccaagcagaagagggggaagtagtctttacatatagaagaaaatcagctgggtgtggtggctcatgtctctaatcccaggactttgggaggccaaggcaggcagattgcttgagcccaggagtttgaaatcagcctgggtaacttggcgaaatcctgtctctactaaaaatacaaaaatgagcagggcgtggtggcacgcgcctgtagtcccagctattaatacttcggaggctgaggtgggaggatcacctgagcccaggaggctgaggctgcagtgagccatgatcgcaccactgcactccagtatgggcgacaagagaccctgtttgaaaaataaaataaagaaaatccacaaatgacatttataaactaattttttaaaaaactggtgtttattaacctgacatgacaacttcattaatctactggatttactgagatgttttcgggaccaattgcaatcaacaagttacctcaaaattaagttaagggtctgttaactatattaaagcaactcagtctcaataacagattcaaacctgaagcttaacatggagatgaactatgtttattcagctgaaagttgtaccttagtagcagaatttactgcaaagtatcacactgatacaatgatatgcaaattaatcagctaggatttggtacaaatgatgtctcttataaatgcaagaatattataaaacagcaaaacaaagtaacaaattacagatatgcacattatttccctgattacacacagtagaaaatttttaatgattttttcagaggtggttttattttaaacagaccactacttcagtttttaattatcccatgtaaaatttttatctattgcttaaaaccactgatacaaaaacattagaattttaaaaatgctaaagaatacacaaatagctaatatacatagatatttctttgtggacatgtctgaggtgttaatactgttaagtaccaggttctgttattaactacctcgcagtaggtcaatgaatgtctttgaattccatacgcactttcagtccacagcaccttctgagtagttattctaagcgtactaccacatctaaaaagaggcgtacctttaaaaggaacgctccactaaatttggtatttcgacatttacaaaagagttgtgctcccacttacaagatttcactaaatgaagaatttaaatgttcatttgtattaaccattactcgccgagcatcaggcactgcattcaaatgctttgcatagagcaatcttattttgagctccatctcatacgaacgctattcagaggtgaggctaaaccacttgtggctccatgtcacagttttggtgtatcaacctaagtaggtatcattccagatggggatgaaccatggttgtccaaatataggctctgtattgcgtatatcagtacaacagccaccaccaccccttacctggagtactgcaacaatctcctaaagggggtccctgtgtccactcttgtcccctcacagtctattctcagtcaatacaacggccagagtgtgatcgtttttaaaacgcagctagggccagatacggtgcctcatgcctgtaatcctaatactctgggagatcgaggagagaggactgtttgaacccatgagttcaagaccagcctgggcaacataaaaagaacctgtctcctataaaaacatttttaaaattagccaggcatggtggtgtgcaactgttgtcctagctacttgggaggctgaagtgagaagatcgcttgagaccaggagtcgaggctgcagtcaatgatgatcgtgccactgcactccctcctgggcaacagcgagaccctatctcttgaaacaaataaataaaagtagaaggtccttaaaagtagaagaggaaattggaagagagagccagagtgattcaatgtgaagatctgccggttagctgtgactggctttgaagatggaggaaaggagctttgagccaaggaatgcaggtagcttctgaaagctagacaaggaacggattctccctcgaaggctctagaaaaacagcactggcaacacctcattttagcccagagacctacttcatatttctgactccaaaactgtaagataataaacaggtggtgtttttaagccactaaatttgcataatttgttacactagcattaagaaactgagtctcccttcccactttagaaagggctataactctcctaagttctcaatatctccaactatggggtagctggttttctgacaaatagctggcacccaaatctagactgcctgatacaaaatgatctaatttttcccacgtaattaaggttgctctcaggcttgccctttaaggacgaacaataaaagggtaaggttctccactgggatggacgcatgcatatggagcagactgcgcaggctccgttcacaagcacatctagccgactgcgcagattctgttcacgtgcatatctagcagaatgcgcaggctccagcaggcttttttggggatgatgaagaaatgaagaccctctgtttttggtttttttttttcttgctgatgctggtctaataagccttccttttctccaataaagcctattccttaactggtgctatgtgtaaaattgtggaattcatcctgagggctgaagaaaacaggtggaaaccgagtagggatctaccttgaaggacaacataagcttccagggcaagaatatgtgttcacaaatatatacaaagtactctgaagagtactaccttcagcaggcactccaccaatatgtgttgaataaatgaataagaactatttcacaccatataaaatgaactacacatgccttaaaggattaaacatacaaggcaaaactatgaaacagaagaaaatggtggggacatttttgtggtctcaggatagaaaaagatttcttaaataaaattccaagaacataaccgtaaggagaaaaatctgattacataaaaatcaagatttatgttcaacagacaggctacagaatggaaagatgtttccaatacccaaaagtgacgatggaatagacaatggcctggaatttgataaccaaaaaaagggacaaattagaaaagtagttaaagcataggaaaaggatattcacataacgggaaaccaaaataactcaggatacaaagaaatgcccaaattcaaatcattcaaaagttcaatttaaaacaagaaactaccactttataccatgtgtgtgttgggggcagggggcggcggcggcggcaaatgtcagaaaattaaataacgagagcagttagcagggacataagattcccctatctctggagatgtggtgtacacacaggtgtagacattctggagaaaagtatatcaagcatactcatacctataacccagcaatttcatccctaactaagcattccagaaaaattctcaaattggttaacaggattgattgacaatgttcagggcagctttattggtgacagctggtgccaatccaagtgtctattttaagaaagtattaatcaaagaaaatgtggagaaagtatacactatggaatttcagtattggttaaaaggaaataatgtccacacaaaatagatatattataaaaaactgttgtctacagaaaaaagtgagaatcaggtttatagcagaatagcacttaaaaaaaatcacttattttcagggcttataaagaggtccactcccatctccacaaccaatttttttaaaattagaaaacataaattttctggaaactttggcaagatagaaaaaaaagcattatgatgtagccagaggctgagaagtggccctaatggcgtatcagcagggacacctggggctcccctaacataaacactaaaataggaagttgctacaaagaaatttatcctatgatctttcaaaaaatttatagaccaatccctagaaagtgccaaatagagaaaaaacaaaacaaaacaaaaacccatgcccttttggagaaaaaaaaaattactcagtttcttaaatgatctgtcaaaaaatattactcagtctcttaaatctttctttctctcctggttctctatgcttagtccagagaagcaaaacagagatttgagaaatagtccaaatctttcatatcagtttttgagtgagtcttatctctttttctgaaaccaattcctcaggcttctatgtcaatacttaggaaaactgagagaaaattacttgcagtttctccgtctaagggctgcccccgccagaactgcacagaacaatttcatatactttgacactctggttctgctggattaaatccaacctggggttcggaatgtttcacaagatgggatacaaactaaacttgaatttaacgaaaaattctgggaacggctagtgtcttttaaaatacagataggtgtaacattcccttttgaaactacagataaatttgagaattgtccttcattggagagcattattacagagcttagaacattttgttcccaatatattataagtggagtgtgggggtacctgcgagattaactgcacattttcctaagttatcaaatgcttttctgtgtctgaggaaattaaaagacatttttattttcaaaaataaaggtagcagttaagaaaaagcaaagcatacatatctatgtaatataaaaagagaaagcacatacagtgaaagattaacagttgggaccctcaggtgaagggtatctgcgtgttcactgcatgattttttccccaattcttctgtaggtttggagttttatatataaagagttgagggaaggctaaagtcaacagttttaatttagtactcggtctgatgatttgcttcaacctaacatctagctcatgatttaattacttcattactatacatgcctcatgacagatgctcttgtatacacaattcaggtaaaattgacttgaagtccactcagcgtcactgtatgtctaaaaataaagaagcttggaaagcctggatggaaccctgagagacaggctagtccctcaagcagttgctaaagagttgagcggtttcttctgaagttcaagataacactaccgaagaatgttatcaccgcctcgttctacaattcgctcaagtgaatcctgctaaatctttgctcttctcacgagtcagacctactgctattagtggaaactacttatgaaatgaattttatttctaaatttctaatcatcttgcaatgcaatattaggcattgtcctctcggtccgctaacctgatcaaactggggtccctaaatccaaacacgcacatacagcgtgtcttctagtacacaaaaaaatttccaagtagacaacccattgttatctccttggtttacttccttgcttaaaaacaaaaaaacaaacccagatggctaccatatacgctgataaatgattctggtgtgtgttgttctataaagagagcggatttgaaatgagtgaatcgctgagtcccgcgatgagacagggtctgcattttgctcttaaaatctcgggggcgtcaggaccacatcccagctgagcaggctgagactgctgaggagtgcggacgggcgaggaggggacgcggaaaggagggagcggcgacaggcgacccgtccggcacgggtcccggcggtgcccggtccccccgggctccaggccgctcgccccccgcccctccccttcgctccccgcacagctctcccgcccctccccacccggctccctcaagtctccacgaacggaaatgggagtcacagcgccggggaccagcggaaacaaaacacagaggcggccgcgggggggcccttgtgggggaaaaggccccggaacgaggccggcccgcgagggcccgcgctcccctcctccccggcggccgcactcacccactccggaatcggccctgtcgcccccgcccgcactccagagccggctgagaacggcagcggcgagggctccacgtgcagcgtctctccgggtaagacctgcagctcccgcgactagaagtgtgaggtcccagggcccttcccgcggaatcggcgctgagaagccccaacccccctcccgcctcccaggcaccttcgggtccaggactacaactcccggcagggtgcgcaaaacgaccgcccaaggcaacggaggctcacgaggtacaaggaagcacaacgccccaatccgctttgttttacacagtctcactttccctgcacctttatacacttcgataaccctaacgaacaggacgctgactcggaggggagcttgaactaggggaaaggccactcaaagagcgcatgcgtacagagcaaggtttcaaggaggggaaaaagaacgggtcaaattaggcgaagaaaagatggcggaggctgtgccaggggacccggaagcacttaccctccacttcctcctcctgtttggcttctgtctcacctagacccgtccggtcgcagactgtctccgagacgcttcctgtccggtgagcgtcgaccgactgaaacggcggcccataatgcattgcgatggcgggtaggcgtgtgggggcggagccagggccggaagtagagcggaggtggtggcggcggaggctttggcagctcgggactgagtgcaaggtgactgggagggtagctagatcagcgtggccttttgggactccagttctgggttttttcacgaggcctgggctgcctctcacctttactaggaggagagagcagctctgtgtcctggggaccttcacggcctggcccggggtcacagctgacctctacgtttgtagaccttggagtttgccgtagacccagaaataagatcgataccctctctgagggcaaatcggggcggcgcggggggcagggaggcccgggggtctcgggcccgcagcctggctggggcaacccaaggtcaggcgcgcgggagagattttcggccaggcctacccgccccgggygcacgggagcgtctaggctacttaggcagaacgtgtaccattaagagggaaaaaattagtcataatattgaaagtttgcatcccacctaaaaacgatggtgctaacacttcattaggcgactttatggattgttcataggaatatgcactgaagaggcagcgaacctactaacctttggccggtcagtcatcactataaatagaaccatgctcccacccagaacaaggcctctgctcagactagtgttttcttactgttgccttccccagtctttctgatcatgtcagacgctatcatatgctctcgtggcacccgatggtactggaatagagaatttatgtcaggtggtatttcacagctatttgtgtaatgactatcttctgcgttttagtggacaatatgcattcactaatcagtgaaaaaaaatgaaagggattaaaggagaaggaacaagttttgatatgggattatgtgttcgttttttggatgagttcgtaggacttataagggagatgagaactgttgaatgctgtggatagatttggggctcaggatgaatactaaaattagaaatgcgattggggaatcataggcacttacatggtggataattgaaacaatgaaagtggattttacccgtgttgcagaaggagtaacatctatgcagtcagacttagagcaaattaactgtgwgaatacgtgcagcttaatctttcttagatacagttttatcatctgtaaagcagggataagaacactttaactctttgagagtattgctgtaagggtacaaggaaaggatatatatggaagtactttgcacagtatctagggctaagcaaatgtcgggtgaacctattgctgaatgttaagcatgtccttagtttgccagaagggaaagtggcattgaattgcacaatttttttttttgcatatatgtgttaagttagattttgctgtgtaactttgaccagatactttttttttgagacagagtctcgctctgtcgcccaggctggattgcagtggcacgatctctgctcactccaagctccactttccaggtttacgcccttctgcctcagcctccggagtagctgggactacaggtgcccgccaccacgcctggctaattttttgtatttttcagtagagaccgggtttcaccgtgttagccaggatggtctcgatctcctgacctcgtgatctgcccgcctcggcctcccaaagtgctgggattacaagcgtgagccaccgcgcccgaccactttgaccagatacttctaatcctcagtttctgtgtgtttaaacataggaatgataataagtggcacatgaccttgtgaggtcatttgttgtttgcttgtagccttttctcaagtatttttccctgatggggtataaaagtgatatgttatgaattctttaatttcttcaaacagtttgctttcattctgtcaggtgaagcatattttgttgattgcattgatagtaggatttctttttttttttttttttttttttttttgagacagagtttcactcttgttgcccagggtggaggagtgcagtggcgcgatctcggctcaccgcaacctccgcctcctgggttcaaggaatctcctgcctcagcctcctgagtagctgggattacaggcatgtgccaccactcccggctaattttgtatttttggtagagacggggtttctccatgttggtcaggctgatcttgaatccctacctcaggtgatccacccaccttggcctcccaaagtgctgggattacaacaaagtgctgggattacaggcgtgagccatcacgcccggcctgattgtaggatttctttctttctttttttttttttttgagacagggtttcactctgtaacacaggctggaatgcagtggtgcaatcacagctcactgcagcttctacctcccaagctcaagtgatcctccagcctcagcctcccaagtacctgggactacaggcacccaccaccgcacttggctattttttttttttctgtagagatggggtcatactgtgttgcccaggctggtcttgaattcctgggcttaagtgatcctcctgccttgttcttccaaagtgctgggattacaggcatgatccgctgcacctggctcattgtagatttcttttgataatttttacatgccattccagagtttgtcaaccttggcattattgacattttgaccagataattcttaggggtgggagggctgttattgtcgttatagtgtttggcagcattcctggctttgtactcattataagccagtagcactcagcttggtgagaacaaccaaaaatgtctaaagacattgccagatgtctccttggagagaaaaaaactcacttcttcccccacccccaaccctattttgagaactattgtgcgactctacagttttctagctagtgctgctcaaactctgagtggtaaagggccattctcacacccactcctgtggacacttttgaatacagtgaaaatgaattacaaaagaaatgaaatttaaaaaacaaaacaatgaagtcacttaaaatacaagctctaattttttagagacaggttctctccatgtttcccaggctggtcttgaactcctgagttcaaacaatcctccctcctcggcctcccaaagtgctgggattacaggcatgagccacctcgcctggcctctaaatacttatatctaatttctatattactttagaccaataacatagtttgtatacttccactagtcctattataacttagtagaagtccggtgtcaatgtgatgatgacagtattgctattaggaaatttggggagggcatgggaaacatgttagcatatcagattttcacttgaagattcagaaattttaccagccagggcaatatggcaagacctcgtctctacaaaaaaaaaaaaaaagtaaaaattagcctggtgtgatggcacacaactgtgctcccatctacttgggaggctaaggtgggaggattgcatgagtccaggaggctgaggctgtagtgagccgtgttcattctgggcaacagagtgagaccctgtctgaaaaaaaaaaagattgagaaattgtaccaggctgtggtgcattgtgagccttttgtcaccgttccaatatggggtttggcaagccctgtcagtttatagactcggccttaatctragaaaaatgtattctactaattatttatggtctcttttaatcatttccttttttttctttttgagacagagtcttgccctgcatccaggctggagtgcagtggtgtgatctgggctcactgcagcctccgcctcctgagttcaagtgattctcctgcctcagcctcccaaataactgggattacaggcaygcgctagcacgcctgacttatttttgtatgtttagtggagacagggtttcaccattttgggcaggctggtctcgaacctctgacctcaagtgatccacctgcctcgggctgaagtgctgggattacacacatgagccaccgtgcctggccctctttattccttttcttctagaattcctgtttgtacctatttgttgtaatttggattattttttgcatttgatctttaaatcactaaagtaaatctcaacaggaattgtcctctactgaaatgttttagttagaaagtaatatattttagcttaaggaagtctagggatttgaaagtctttaagtctttttttttttttttttttttttttttttttttttttttgtgagacggagtcttgctcttgttgcccaggctggagtgcaatggcacaatctcggctcactgcatcctctgcctcctgggttcaagcaattctcctgcctcagcctcctgagtagctgggattacaggcatgcgcsaccacgcccagctaatttttgtatttttaatagagacagggtttctttttgttggtcaggctggtctcaaattcccaacctcaggtgatccaccagcctcagcctcccaaagtgctgggattacaggcgtgaaccactgcaccyggccataagtccttatttttaaaattcagacttccatctccttcaccaatttatttcactgataaagttggactgccggatcctccccactgtcatgcacagctcatttggactggctgctgtttttctttgctggttcttctggactttgatttagttgttacagtattcttaaatggctggaatccatttgtaacaggcagagcagtttctccctctgtgggcctgtgaagtacacattttcaggttgtcatgcccggctgaggtatgggaaaccttgtacattagtttgggggccagtgtacttttcctgttaggagcggacagtgttgcracagtctacctctactgttttctctgatccatgactaagttcaagggggaagaaatacctcacctcacattttgtgctctaaccctgatgaagcttcaggcctgagtttctaactgttccattatcccagagccttttggttaagacctaaaaaacttgcaatggggaataaggaggagaagggaactgtggtcaggtatagactgagatctgatatgatgtaattctgtagcaattagtagaatttgattcycatgatrtatttagaggtgatttataataagtatattaacgtttctgctgcttgttttctgtaacagaatcagcatgattcttcagaggctcttcaggttctcctctgtcattcggtcagccgtctcagtccatttgcggaggaacattggtgytacagcagtggcatttaataaggaacttgatcctatacagaaactctttgtggacaagattagagaatacaaatctaagcgacagtaagtgaataaataactacagtgtaaatataaatattcaaagtatgtaagtttcaaggtggtaataaaaatgacttggtatttgaaagtattagaccttcactgagctcatctctgacatagaggttcattaggtgccctcaaaaaagaagataaggatcttgatttttttaagtcagaaactgtatctttatatgagttacaagggaaaatcctactaaatttattgctgtttaaaatacattcttactgtcatgtcatgtattataaaccacatcaatttatagaaatacatagggtcttggaaatcatttagcagctaagtttgaaaaaagtaactcccttagacattgattagccgaagatcataaaactaattggggaaaaatatattatcaaagtatattttagcctcaatttagtggcctttctgtgacattgtaatttgggggaaatgtataaacacagctcttttttttaaaaggctatttccatagttacagatctctgagaatgtatattaaaggacaaaagactctgaaatgacataatgtaagtccaagaaaaacaattgtagaaccatagttttggaaaggaatgaccaccttagctgtcatcaggtccaaacccaaatcttaggaacagtgaggcgcaccaattcatagttccattttctttcatatagttgtctactgtgtgtaaagcacttggctattaaccgtgatgggccacagggcatttttacaatattcttaaagtccgataggagtagaaagcttctaagcaaataaatacaatataaggtaaaatgagttaggtgctaaggtagggaaacgctgggtgcttggggagttcataggaaagaatactcctttccagctagaggcattttagaggcttcttggaaggcagtgtttgggtactcatccctcttgagaatctcatggacaactgtggatcatcttcccagtttaaagaaaaaaacrtgaagaatttactcacatcattttccttatagcatgaaacagttctcaaacccacaggaggccttcagtagacctgtacacccaggggtttactctaggttttaaagatcagtgtatgaaggttggacagataaatgagggtaagaggagagtatcttttaggaggaaagaatggtgtgaactaaggcatgaaaatgccttagtttgtgctagaaagcacaaaatatatttggtgaatggtataattctatttccctggagtatagggtatatgaagagtataaggatggtatggggttagaatgagggattatggaaggccttgattgtagactgagcaagtaagatatgtggtaggcatttgtgagaaattacagctttttgaacatgactgtggggatggaagattactctgaattaggaggataattttaaccagggtattggaaggattgaaatgagaagagagcaaagacagacatgttagcaaaatgtaacctaagcattagttgatgagaaccttgactttatagcagtggtaatgtaaaagtgacagagtcaagacattgaaacactgatgcctggttttggtgagctgctggagaggaagaagagggaacaataaaagaaaactgacttttgaggcgaggtaactaacaaaggtgttaccattgccaaaactgaggaggagaaatagtgaagggattaaaatgtagtaagttactctgtgctttgtagacatggtaatgaaactctgacaacaaccctatagatgttaccccaattttatatatgagaaaaccaaggctgaaagttagaatttgccaaaaatcatactgttaagtaaccagatgtgcaggactcgtcagggaattttgagtgtcttctgtccaaatgtggtgttatattagagtattgatgctgtttgcatcattttaactgtctttaaaagcctatctagtaagaagtgaattcttaggtgtaccctatatctaaggagtcttgtttgtgggtcattcattcgtttgtgcaaacaaacacatggagagttctgagggtagaccctgggctggcatccagcactgccactaattagctctatgaccttgggcaggtttaacttctgtaggacagttttctcatatgtaaaaggaggatgatggtagtacttacccatttcataggatattataaaaattaaattattcaatacattagcatgcctagtatttgctagtgaaatgaacaagtatcttctgagtgactgctttgtcctaggcatcatgtgagagcctaggaatatagtaataagcaagataagcagcaagacttacattcagttgaggaggtagatgatttctggcctctttttatcacaagagtgcatattaaagttaaaatagccatcatccatctgtaaccagtattagagtatctagttgaaggatctatttagaaccgcagtgtccattttggttgccgttatccatgagactattcaaattctaattacaattaagtgtatttataaattcagtttctcattttctcattcatgttagctatatttctagtgctcaatagccagatatggctagtggctgccacactggacagcacagacagagagcgtttctaacatcacaaaaaggtctattggacagtgctaatctaaaagaaaattgggtctctaacaagaaatattgataacaagttcttaaattggagccacctatgtattttttgtgcatgttctttaacttaaataagactgtatactttgatcataggcatgtgtaaaaatgttattacccttgaaggaattttcatgtgtacatttttttacatttagaatattgttcattgctaggtaggcagtagtatttatgacaaaaacagaagaatttctycaaagaattaatgagacccagttggccctgctgctggtccataatgctatatttattttcccaaaatgcacaagtctaattttgtcattttattgcttggcaaataaaatacaaactcccaggcttaacattccgggcctcccatgatctggggtctgctggtttttccatctagactccttagcattccccacatacagccaatcccttaccacctctatgtctttgctttttccatcttagaaggtctcaaaataaaccctggccccagatgcctgatgtttctcaaatgccacctttttaaaatgaaattttccctgattagcttagcaaaagtaatctcttcctcaacttgaatagctttttgttaaatcatgtctttgaagctcatcacatcactcctttacagcataaatgtttgtaaacatgtaatttttttcttcgaaattgcaaaatctctgagggtaggaaataatttgcttctttaataggacccctatggtagaaacttaaaagtctaaggtctttaaaagccatttagtgatggctgacttaaagcagatgatattagtagataataattgagtactcactgtgtgccaggcactgtgcttagaggtacgtgtgcatttacaccctcgtttggtagaaccttcatatttagttgtggaaactaaaatttagagtgctctgtgccttactcaggtttacgcagttgctgaatagttgaacttacactcaaacaggaccagtctttgactccagagcctgtagacttaacgatacaccttttgcaacttagaccctgagaaattctgacttagtgagtgtccgtgattctgagaaaccttgaatgttagagattggtttgaggatacctcatttatgtgaaacctcatcgtaataaaatagtttgaattgaaattgaagtagaaatacttattttctttctgaagtcttttctttgactacatgaatgctttaaaaaggtctattggccgggtgtggtggctcacgcctgtaatccragcacttatgggaggccgaggcgggcggatcatgargtcaggagatcgagaccatcctggttaacatggtgaaaccccctctctactaaaaatacaaaaattagctgggcatggtggcgtgtgcctgtaatcccagttacttgggaggctgagacaggagaatcgcttgaaccagggagtcggaggttgcagagagccaagatcatgctaccgcactccagcctggcgaccaagcaagactccgtctcaaaaaagaaaaaaaaaaaaagatctgttggaatgtggtggtgaaaagtaattttgtttttgtaagctagtacacaaaattaatttttgtttgctcatttacttaacaggacatctggaggacctgttgatgctagttcagagtatcagcaagagctggagagggagctttttaagctcaagcaaatgtttggtaatgcagacatgaatacatttcccaccttcaaatttgaaggtacgtcttataaatcacagattcattcttgtgggggataagtgaagaatatttacacttacctggatttttagagaaytgaatgacagtgttgacatgtgaatttattaggaccatgacgtgtgcctgagaagctgccggctaaatgtttgctgttagaataagagcagtataggagatcacataacatagtgattaaatggtggggatctgaaatcgaactgcccaatcttgaatccttataatcactttcagctgtgtaatcttgagtaattaactggtgcatgtctcctcatctgacatttggggagaattatagtatcttctgcatatgtagttaaatgacataatatatgcaaagtcaattaatggaatgcatggctcatagaaagtgttgcataaatgtttagctatatttctatgtaaatgtttacaaacagtgtttactaaaaaaatcagaaaattgatgagttaaatcttgagcattctacataatccattttattgcaatttggctaagcttgacccttttttccccctcttcttagatcccaaatttgaagtcatcgaaaaacmccaggcctgaagaaataaagtaaaattaatctggtaatttgtcacggattagttgtacaactagttagaagtttcagaataaacatgcatttcataactgtcaaatgttcttttaattctgagtccaaataaattatttggtgatgttgagtgtgttcttgatgaattgagttctgtgtgttagagttgtttttagatcctttcatttggttataataaagcagatggagaccttggatgaactggacacaacttgcacataaccctgcttgttgtggagggatgttacccttcctttagaacatgaagaaatggtttataaattcttggtcatagctttctcagaaatctgagtgtaattttttatatgtcttggaacatctattgtgtttaactttgatctcctcaaatgttaaataattttctcccagtaacccaggtccctcatctttgcttgcagatcacagagtctgttacagttctgttcagattgatgagggaaaggtagggatgacgggggttctataaaggaacttactttaaaagagtaaactttatggtgttgttttgtcctaataagaagagttccagcagatacattctagataagtggcatatcagacatggtcaaaattttagtgactataactgtctctcaaggaagttattttaaaaaatattttaatggtcaaaatcaggcttaaaaaaagtaaattttaaaggaaaagcagccatgtctttttagtatttgacaatatctctgatatgtgttaataaatataggtctttaatagatttttaagattttctttaaaagtgtaaaagtgtgaagccaacagtgttctttttttttttttggagatggagtctcgctctgttgcccaggttcaagcaattctcctgcctcagcctcctgggtagctgggattacaggtgtgcgccaccatgycyggctaatttttgtatttttagtagagacagggtttcaccatgttggccaggctagtctcaaactcctgacctcaggtgatccacccacctcggcctcccaaagtgttgggattacgggcttgagccactgcgcctgggccaaagggaatagatttttattatggcatactgtagctgaaggcaaaacctgctagggaatacctttttgaaagatctacaaatatttcctaatgacatagatatgattaatacgatgtgtagagacggaattggggagggcagtacagtaggaagaaacagcccacttttcttcaaatgtggctaagcagtgacagaacagttgaactacttttatttaaataattgcaggctttggaacagagaatcgggtgtctaattatggcactatctaaaggtaatcgaggaagtctagttgtcccagggtcttcctttaacctcccctgaaacagctctcctccacctacctgtggctgcaaagccatcttgtgtcagctggaactgccagtcagtagagaacaaactgaccttttctgcatatgcttcctctccctgtctctttacctccttcttcattcaaagtttagttgaattttaccttttatcagctaacacagttatctcataacacattttttacttgtctcacaactgtggaattgcttgcatgtcccagtctctttgttcattattgaaacagggttctgtttgactgtaagaagcatcctattctcgtgccctatattacagggctgtgcatttacatttaaattttggtcaggcaagcactccctgttttccaactgaacctctcgtggtgctgtgagtcacagatcttaaccaaggcttcgtcttcctcagagccccttcctctttttggctaggctgctccaaccctgcaaatgctggcctttgtgcagcacttcagcctgccaggtcactccttgtcctgcacttaaccattcagaaccaccttatgtgattatgacaaatgatctcagccttgtggttatttaaaatggctattttaccccttgcctggtgttatgaagaattgtgtttccccaaaattcatactttgattgaattgaagcccaacctccaatacctcataatgtgactttggagacagggactttaagttaaaatgagacctttagggtaggtcttaatcctatctgactggtgtccttatacgaagaggaaatttgagttgaggagaggtaaggggaactagaaagggacatgtgtctgttacttacatagcactacctttaatagtaacccaggaaggctaggcaatttttacttatttaacatttagtgtaggcttttttgtttgttttttactatttctctgattgttgctgctcctggtgtagcagccttccaaatgctagctctctagtaaggtgcatgtatgagttcttgcggggccctgtggctgaggtcttcccagttgtacagattccattcccttaaatggcaggttcatgccaactcccttccaaacaccccttagctcccactggaatggtaagtacacactgtttccaatgtttggtctggtgagacactggcaagaaggctgaacgccaactacttccaatggtgcctactggatccacgggacactcatgtccttgacctaagaaatcttgggaaaacaggtatatttcaccatcctcccctactttgctctttttttttttttttgagatggagtcttgctctgttgcccaggctggagtgcagtggcgcgatctcggctcactgcaagctccaccacccgggttcacgccattctcctgcctcagcctcccgagtagctgggactacaggcacccgccaccatgcctggcaaatttttttcgctctccttttttttaagagatgggcttttgttctgttgcccaggcagtggcttgatcatagctcactgcagccttgaactcctgggcttaagcaatccccccagttcagcctccagagtggctacaggctacaggcatgcactaccacgcctggccctccccctcttcttgatatttttttccagctccctttccactggctcaaatagctcctatttccttggcaggtgccttcagtttttgcaagtgatgtcttaaatattctctttacttcctttgggggtgacctgggggaatagtactccttatgactttggcaaactcattctctgtctctttccatcccctcgttccttcccatcccaaatccatccatacacacttcagcttatatggactgtgtgatgaggtgaagggtaaagagtagtggtggactggagtaattatttcagggtggctgtctcttcatcaacagtgaaggggtatttatacccaatgtattttttcttttctttttttttttcttttcttttcttgaaacaaggtgtcactcttttgcccaggctagagttgcagtggtgtgatcacagctcactgcagcctcaaccttctgggctcaagtgatcctcctgtctcagcctcccgagtagctgggactacaggtgcatgtcaccacacccagctagtttttcagttttttgagacagtctcactacgtcacccatgctgttctcgaacttctagattccaatgatcctcccacctcagcctcccaaagtgctgggattacaggtgtgagccactgcgtccagccttcattttccctagaaagtgagatacttgtttctagtctttaggcaacagagaaagtcccaattaacatcctgttatatgaacatagcgtctttgtaaaacttttattcattctctttggtatatattatcctaaaatttagaaagaaaatgtttcttaacctacagtaacttcaattcagcagtagttaaattccatagtaaatatttggaaagaaagtttgagaatgagaaattaagaagttggctgggcgcagtggctcacacctgtaatcccagcactttgggaggccgaggtaggcagatcactgaggtcaggagttcaagatcagcctggccaacatggtgaaaccctgtctctactaaaaatacaaaaattagccaggcatgttggccggtgccggtaatcctagctactcaggaggctgaggcacgagacttacgtgaacccaggaggctgcagtgaaccaagtttgcgccacggcactccagcctgggtgacagagcgagactgcatttcaaaaaaaaaaaaaaaaaccataagcaactttaggactccaactatagctcttggtaaatctctatttttataccatctttaagaaactttataaatagcacacttgaagttgaaaataaaggatcatgaaatggagctttgaaacagcctgctttcaatctcaaagaaggtaaacaggtcctttgttgacacacacttaacttgttttgagagcattttcttggtggaaagtaaaaagacattttacactccagtttgtcttaattagtacattttttcaaacctggtcaagtaaaaacttagcatatattgaaaagtaaacaaatattgaaagtatcacaaatgaaagcttttagtttaccttgaatttcttaaccaactgttaacactaaaagtgttccaaaaagagaaaacaaaagatgaaaaattaaattttaaaatttgaaagttggaaaaatatttgaagagcttcttaagaactgtgtggaaattcatgtctaattgctaaaagactggtatgagaaaaatagtttccatccagccttcattcatggaacaactttgtaacttcacatattagataactattataattacatatttcagaatacaatcatttattaatatttgaactaaatttatggggaaattttatagttaaatactaaatttgctctttgacaagtgttcctttgatttttaaaaattcatttatcacattaaataccaaccacgttagatgctgttaaattctttgggtcttataaagttgtgtaaaacatggttcttttctcaaaatgcttccagattggtaggggtgtcaaacatgttcattcctattatggggtagaaaccagtaagtgaatcaagggttacggaaattcagagaagaaagagtttccagcaggggaaatgagagaaggctgtcctagagggggtggaatttgacctgtctcttaataagtagatagaatatacaagtcttgtggttaggagaattaacattccargtggatagggtgttataggtaagtgtatagaggagggggaaatgggttaagataaaatgaccatagctcagtttaatgggtacatgaggcaaccgaagaagttagtagaacatatagctgaatacgtaggctgtggcaatatgatgggatatgtctgtgatgggtgggaaaccttgaattccaggctgaggagtttagattttgtgatagactaggtaaaggaagagtgaaagggtttagccaggggaaaggagaagggagttgacatggttcgagagaaatggggcaaattgatggatggggtggggggaagaagagattagagggaaaaggagcctttgaactggagagattgacgttgtgactgagagggtactggagggtggaagttcccggagataaacgttgagatgctattgaaagcctgagataaaaggatgaaagtagtgactgaagaatcaaataagacaatgaatgatgtagtcagtgaataaatgggaggctaaagatggagagatttagagataggagggggcagtggtggtgataggatttaaatgcattcatcctggttagcctcaatatttttcaaaataatattagagatttgggcatcttcggagaatgagaggagagtggaagagaatgaaatggcccactgtgatatttagactgggttaggggaaaggcatgacaaaaaggtattttgtctggcagtgagaccaggaaggcgatgaggggccagagataactgggggtgaaaggaaagtgtgacagagaagcgcacaagaatttaaaaggactgggctcggctgggcacagtggctcacgcctgtaatcccagcactttgggaggccgaggtgggcagatcacaaggtcaagagatcgagaccatcctagccaacttggtgaaaccccatctctactaaaaccacaaaaattagctaagcatggtggagcgcgcctatagtcccagctactcgggaggctgaggcag

SEQ ID NO: 94554 - DNA, 41624 bp, Homo sapiens
cagaaaaactcctccggactttggaattctcaggctcaaattgataaaaaattagccaatcaaattaatgatctccgtcaaagtgtaatgtggctcagagacagagttatgaatttggaacaccttatgcaattacagtgtgattggaatacttctgactattgcataatgccttatgcttataataaaggtcaacatagctgggaaaaggtctcaagacatttaaaagcctgggatgataacttaaccttggatatttcaaaacttaaagagcaaatttttgaggcttcacaagctcattcatccactgttcctggctcagacatttttgaaggaataactaaagaattatctgatcttaatccctttaaatggatcaaaccccttggaggatcattgttgtcactggcattattagtattggtatgcttatgttgtctccgtttagtctgcagatgcctccaaggagtccgaaaacaagtccgaagtcaatgacaagcaatgatggcgatggtgatcctagttaatataaaggggggagatgtgggcagcaagccacccaggtgccgaggcaagagactgagggcacgagctgttccagtataataaaatatataaaacaacaagagttatgctagatctagatcatagacatgattatatatgaatatcattaatcattagtttgtagcaattactctttattccaatattataataatcctcgctctataatcataacctaggaaaaagcaggccatatagagatgggagctgaggggacatggtgagaagtgaccagaagacaagtgcgagccttctgttatgcccggacagggccaccagagggctccttggtctagcggtaacaccagcgtctgggaagatgcccgttgccaagcagaccgtggtctagtggtagcgtcagtgtcaaggaaaaacacctgctacttagcagaccgggaaagggagtctccctttccccrggggagtttagagaagactctactcctccacctgcatctgtaaaaacgggagtaactaatgtatcagctctagcatttgctgcgagaggggtccggggaggggtgtgtgggcccaaatgtgagtaatgtagaaaggagaagaccttgctctgggcacagactgaaacctttgaaaaagaaagaataggtcatcatcaggcagaaattggattaaggcagtttcaattgttgtgagcaacatgtagtacctacgctgaatcagagacaatgttaactggttcagggaaatcttcaaggacggtcataacagcacaaatctcatcttgaattgtactcccataattcccacaggttgtgggagggagaaggtgggaggtaatttgaatcatgggggcagtttcccccacaccgttctcaaggtagtgaataagtctcatgagatctgatggttttatcaggggtttctgcttttgcatcttcttcattttctcttgccaccgccttgtaagaagtgcctttcacctcccgtcatgattctgaggcctccccagccatgtggaactgtaagcccaattaaacctctttttcttcttagtctcaggtatgtttttatcagcagtgtgaaaatgtacaaatacacctagtgaggagaggggcagcctatcttgctactttctgacaaccagatggacctagtcttggccattgggatgcagactgtgcctaagcaccctcagaggggggtgcaacactaaacagagacacaaacacaaatagatccaatgtagacacagccctccaaacagatccctccaaacagaggggagattggagcaaagtcctgaggtcctgtcccagacccagacagcaccatggagtgacctgcgttaggtccagatggcacagagacccaggcagcaccacagagtgacctgcgttaggtccagatggcacagagacccaggcggcaccacagagtgacctgtgttaggtccagatggcacagagacccaggcggcaccacagagcgacctgcgttaggtcgagatggcacagagacccaggcggcaccacagagttacctgcgttaggtccagatggcacagagacccaggtggcaccacagactaccaatactagctctagacagctagagccccagatggcagatgcagaggatttccaggtgcacttcagttcacatcccacatactgcttccctcccaccagcagagcatgagagatgctgatgtcatgaaggagagggaagggaaaatccccaagacaaaggcagtctcggcagccactaggaattccctaaggtcctagccctggggtcagctggccatgagcagctggcattttcaagcagctgctgtcctgcctgacagcaagagtgggtaaatcctgggactgctgtggccaatctctgccttcattggaaaccaggtacacaggctgagccactcacaacacagtgcctcacacaaggcaccagatctgcaaccagctcaagcgtggctgctcaaagaccaaaaacatgagaagcgaggtgtggtggaaggaaagccgtttattaaacaaatgccagccgatgggacatggctgggctcatgcctccaagagaccctctgtcttctgggctgagtgagaggttttggaaggaaaacttggtgtgggaaacatgtgggggtggtgcaggaggatgcagaagggtgcaagggggtgcaggggggtgcaggggggtgcagggctgcatgtcttgttccgaaggtgatctcgagtaacaccctgtctgaaggtccagcttgcatcatcctgactttggcccagtagtggtgggctcactcttcctaactgccccagagcagtaggatccacatctgggtctctgagcctggtttccttcaaaattagcccctggaagttcttttttttttttttttttttttttttttttttttgagatggagcctccctctgttgcccaggctggagtgtaatggtgcaatttcagctcagtgcaacttctgcctcctgggttgaagctcctgccctagcctccaagtagctgggatcacgggcgcccaccaccccacctggctaatttttgtatttttagttaagacggggtttcaccatgttggccaggctggtcttgaactcctgacctcaggtgatccgcctgcctcagcctcccaaagtgttgggattacaggagtgagccaccgcgcccggcctgtaaatggtttttgtttttttctttgtttatttatttattatcagagttgattctctcctggatcaggaaaaaggcctagcaaagcaaggatactatcttcagaatgtggatttcccccacaataggcagccttgcaggattgttttaagatacagcaaggaaatataatttggggtaaaatacttcaatttccttcagggccttgatcagtcacataatgctctactagaaacaggctagaatttggtatcattgctacaaagagtcagctttgtcagtcttttattgttgttgttattttgagatggagtctcgctctgtcacccaggctggaatgcagtggtgcaatcttggctcactgcaacctccgcctcctaggtttaagcaattctcctgcctcagcctcccgagtagcttggattacaggcgcccgccaccatgcccagctaatttttgtatttttagtagggatgggttttcaccatgttggtcaggctggtctcaaactcctgacctcaagtgatccacccgccatggcctctcaaagtgctgggattacagccatgagccaccacacctggcctggctttgtcagtcttaaagtctgtgttgatattaatgatggtcaggtgggcctgaattcccaaagggaggagaatataatgaggcatgtccaacccctacccctccacatccgacccttcccatcatggcctgaactagtttttcagattaactagggaatgcccttggcccagaggaggggtccactcagatggttggggggcttagaattttattttatttttatttatttattttgagacggagtctcactctgtcgcccaggctggagtgcagtggcgcaatctccgctcactgcaagctccgccctctgggttcttgccattctcctgcctcagcctcccgagtagctgggactacaggcgcctgccaccaagcccggctaattttttttgtatttttagtagagacggggtttcaccgtgttcaccaggatggtctcgatctcctgacctggtgatccgcccgcctcggccttccaaagtgctgggattacaggcatgagccaccgtgcccagcctctagaattttattttttggccaggtttggtgactcacacctgtaatcctagcaatttgggaggttgaggcaggtggattgcttgagttcatgggtttgagaccagcctaggcaacatggcaaaaccccagctctacaaaaaatacaaaaattagccaggcgtggtggcacatgcctgtggtaccagctactcaggggctgaggtgggaggatcactggagccagggaagttgaggctgcaatgagccgagctggaaccactgcactccagcctgggtaacagagcaagactctgtctcaataaataaataaataaataaataagaatttgggggctgggtgcggtggcttgtgcctgtgagcccagcactttggggggctgaggcgagcagatcacctgaggtcaggtgttcgagaccagcctggccaacatggcgaaaaccggttaatataaaaattatattaacacggttaatataaaaattaaccggccacggtggcatgcacctgtagttccagcgggaggctgaggcaggagaattgcttgaacccaggaggcggaggttgcagtgaaccaagatagcatcactgcactccagcctgggtgacagagcgagactccgtctcaagaaaaaaaaaagaattttggttttggtttacaccactcaaaagtgcaggaattccaaaacaagccggtcggggcacagtagagcacagactctggctcctccatccgcccgcaccccaccctgtgaaaggaaaataaatctcaaaaccccacaatcactaagtcaaaggaaaaagtcaagctgggaactgcttcgggcaaatcggcctcccgtcttattcctaaataagatagttacaaatacatatttttaaagctacacacctccctcacaatttgcccacaaagaaattctctgtgggcctcaagatctttaccctaaaacagttctgttgaatttcaccctggcaatgcaaattgatagcttcccttcacaggtgcgagacaaaggactgaactcaaagccatccctctgctcacctagacaaatgcatatctgatcgcttcctttgctctactgtttacgtagaaatgaagattcagtaagccagactaaagcataagcgactattcctctacccgcgtctcacatgcataataaattgtgcagtcagcgaaaggctgaacaaagactcaaaagaatgcaccctccggtctcttctctacctgtgacctgaaagccctctcctggaattgtccagcctttctgggctgaaccaaggtacactcgcacgtgttgattgatgtctcacgtctccccaaaatgtacaaaaccaagctgcatcccaacttccctgggcaccatcgtcacgatctcctagggttgtgacactggcgtgtccttaaccttggcaaaataaactttttacatttcattgagtcctgtctcagatatttttgggttcataacccccaccctcacccctacccgcggagagagcgagccgctctccagcccctccccggctctacgcaggagaggccactctcctctatggcacgcgcggcggcactctagcagccaggtggcttctctatgggcttttccggcacaggtcggaagtggcgcgcgctgccccggaagcamcctggtgggtgggtgcctgccagcagctgaggcgccatggcggcggcagcggtgtcagagtcttggccggagctggagctggctgagcgcgagcggcggcgggagctgctgctgacggggcccgggctggaggagcgagtgcgggcggcgggtgggcagctgccgccgcggcttttcaccctgccgctgctgcactacttggaagtgagcggctgcgggagcttgcgcgcgccggggcctggcctggcgcagggcctgccgcagctgcacagcctcgtgctgcggcgcaacgcgctggggcccggcctgagccccgagctcgggccgctgcctgcccttcgggtgctcgacctgtcgggcaacgcgctggaggcgctgccgccgggccaaggcctgggccccgccgagccgccgggccttccgcagctgcagagcctcaacctcagcggcaaccggctgcgcgagctgccagccgacctggcgcgctgcgccccgcgcctgcagagcctcaacctcaccggcaattgcctagactcctttcccgccgagctctttcgccccggcgcgctgcccctgctcagtgaactggcggctgctgacaactgcctccgagaactcagccccgacatcgcccacctggcctcgctcaaggtcagcgggggctgcccgggcggggcgggatggggccttggagtagccctggagaaggaacccctctcggggccgagcagttcctagtgacgccccctggggcactgggcccagggaattcctacaaggctgaaaggagccagctgcggggggcatcacccctgggaagcagatgccgccttccaactcccccttctcctggccacaccaacatactaggtggcctctgaactcccccgcattctgttaactggacttttacacgtggtacgctattttgtaattgttagcaaacctggcttctcctgtagatcgagcgtagagacctgtcttttttgtatctagtacttgtgaagtgacttgagagtgagtctggtggtgaagggggcaccctggattttgcataatgccacatgctgtgatcttgaagattatatttcacttcatcctaatagcagctttccaaggtaggggtggttattcctgttttacagaaagccaaagggcctgcccaaagtaagcagcaggtaacttgggtttttctccagactatattgtccagcgtctgtttactaattaatcttggatccccaggccccgcgataatgcttggcctataacaggtgcccattgaatctgttgcctaaaagaaagtagggaagccacatggcagaaccacgacctaaacccagccagatgttctctccatcttctcttttggtttcatccttaaggcagtcctgcatttcttcccccatttttcgtctttgaatttatgcagacatttcttttttttttttttttttttgagatgtagtctggtcctgtcacccaggctggagtgcagtggcgcgatctcggctcacttcaacctccgcctcccgggttcaagcggttcttctgcctcagcctcctgagtagctgggcttacaggcgcacaccaccacgcccggctaacttttgtgtttttagtagagacgggtttcactgtgttggtcaggctggtctcgaactcctgacctcatgtgatccgcctgtctcggccttccaaagtgctaggattacaggtgtgagccaccgcgcctggcctatgtggacatttcttaataaaatacgtatacactttagcagcttatctatttatttgctgtagcaattcctcaagacattgcaactcattttacaagtaacatatctatataaggatatatagacaaaccctggccgggcgcrgtggctcacacctgtaatcccagcactttgggaagctgaggcgggcagatcgcttgaggtcacaccaccagcctggccaacatggtgaaaccccatctctacaaaaatacaaaaattagctgggcctggtggcgcgtgcctgtagtcccagctactcgggaggctgaggtgggaggatcacttgagcccaggaagtggaggttgcagtgagctgtgataccagcctgaacagagcgagaccctgtggcaaaaaaaacaaacccactgtagagtgacacatggttactgatgtaactgcccaatgggttcattttatccactacccggatagagctgatttatcagggcaggagggttgcaatagagaaagttttacacatgtagagccagctaaagtggagactggagttttactgttattattattgttgtttgagatggagtctcgctctgtctcccaggctggtgtgcagtggtgcaaccttggctcactgcaagctccgcctcccgggttcacgccattctcctgcctcagcctcccgagtagctgggactacaagcgcccgccacaacacccagctaatttttcgtatttttagtagagatggagtttcactgtgttagccaggatggtctcgatctcctgacctcatgatctgcctgtcttggcctccaaggtgctgagattacaggcatgagccaccgcgcccggccgagttttattactaaatcagcttccccaaaaatttggaggcggggtttttcaaggatagtttggggaaaggggagggtggctaggcaacgggtgcttgctgctgattggttgaggtgcaatcataggggtgtgggaaacggtcctgcttactgagtcacttctggctggggctgcggggagctctttttggtttcaggtagagccattgatcagacatgcaaaaaccctgaaaagacacagctcagaaggccggtcttaggttccacagtgctgctagtgctgttatctgcaggagtcaytggggaagtcgcatatcttgtgacctccagaagaatagctggcagttgtttatgtctaccccttagcagaattcaggttcctccatcctcctatcctcgtggaccctcattagctttacaaaggcagttgagttttacggaaggagtattatcatttaaattacaaatgtctcccaaagttagcttggcccaagcccaggaataattaaaggtagtttgaagggccaggcgcggtggctcctgcctgtaatcccagcagtttgggaggctgaggcaggcggatcacctgaggtcgggagttctaaaccagcctgaccaacatggagaaacccatctctagctgggcatggtggcacatgcctgtaatcctagctactcaggaagccaaggcaggagaatcgcttaaacccgggaggcggaggttgcaatgagccaagatgataccattgcactccagcctgggcaacaagagcaaaactccatttaaaaaaaaaaaaaggtagttggaaggccaaagatggggattggttagatcagatctctttcaccaccataattttctcactgttacagtttttgcaaaggtggtttcattggcatttcctggaagaggcgagttcactggcattttccttggtcctcagggctgtaggcatccctctaggactaaggtgtgatgttggatacagcatggtctactcccaccttcccacctgacagatacttttggttttccagagtgttgatgtactaggcatgtatcttagcattgtgccttacatcatgtaagtgtccagtcagttgcaatatttctcttcaaattcatagatgtctttcagtattcaagttcttaaaagtgttgtgggccaggcccacgcttgttatcccagcactttaggaggccaaggcgggcgaatcacgaggtcaagagatcgagaccatcctggccaacatggtgaaaccccgtttctactaaaaatacaaaaattagctgggtgtggtggtgcatgcctgtagtcccagctactcgggaggccgaggcaggagaatcgcttgaacccgggaggcmgaggttgcagtgaaccgagattgcaccactgcactccagcctgggtgagaaagtgagactgcgtctcaaaaaaaaaaaaaaaaagtgtgcgtccagctctctgtagcacctgcctggtaaagcattcctctttatggtgcccaaaacaatgtcattcaagtcaaagagtgtgtcttgttttctaaatcccaaaagaggtggccaagttccctttcccctgggccattctgttcgtaaattttaggcgtccagtggctctctatcaggagacctgtttcttggagggtcatgcaagagctattggaatcccttgttgcactcagatgtccttttgggtacctttctgaggaatggctaccagaactatgcccagcaatgtagctacgcacattggaatttcgcacacaaaggcaaatgcatttgatgtccttcctggtgctgtggggagatggggagtgtagaaaaccagaaaactgagctcagaaacagaaggcaggctgggcacagtggttcatgcctggcatcccagcccttcaggaggctgaggcgggcggatcacttgagcccaggagtttgagaccagcctgggcaacatggtgaaaacctgtctctataaaaaatacaaaaattagctgggtgtggtggtgtgcacctgtagtcccagctactcaggaggctgaggtggggtgaacgcttaaacctgggaggttgaggctgcagtgagccatgatcacaccactgcactccagcctgggcaacagagctagaccctgtcttaaagaaaggagagagaggccgggtgcrgtggctcatgcctattatcccagcactttgggaggctgaggcgggcggatcacctgaggttgggagttgaagaccagcctgaccaacatggagaaaccccrtctctactaaaaatacaaaattagccgggcgtggtggcgcatgcctgtaatcccagctactcgggaagctgaggcaggagaattgcttgaacctgggaggcggaggtttcggtgagccaagatggtgctgttgcactccagtctgggcaataagagtgaaacttcgtctcaagaaaaaaggagagaaagaagggggaggaaaggaaaaaaaacagaaggcacgggctccagccctgtctctctgtggctgcgtgccgttgggtcttgaaggctctttgctcctctgtaggaagactgggagggtaacgcagtacacgaagagggaaagagatgggggaggtagtgctggtcattgtggctgcttgactccgaaaccacgaggcttaaagcagcagcggctctgcgctctgggctggctccgccagacagtggacagtgaacagtggacagtgctgcagctcttgctgctggtcgctcgcgtggctgtgctcagctggcgtgggctcagggctgggctgccggggtgggtgggcttctccgtgtgtcgtctcggggcctctccctccccttctttcacagggctcagggctcctcagtacaaaagcagcagctgccagcccttcttcaggcatcaacctggaacatgcttcctgccactttcctgcgttccgtgggttaactaagtgcgagcccagttccggttctttgggaggactggctctttaggggccgccaaaataacagcacagaggcttctgcctgtcctttccctccccagaggggcgagactgcaaatggaagcagctcggcctggctcctagtgcccatccccacagccattccccagggagcacccccaagcctgggctgggacctgcagtgcaaaggccctgaccctctttcctcccagccactggggacgaggcctctgctgtcctatggcctcagcagtagctctgcctgcgtgggagcctggcttccccagtgtcctggcctcagagccacgtggcttgctgagacctgagagcacccggccggccctycctggctgcttcccgctgctgtggcccgtggggctcakctggcagtgctgtggtgagccgaggatgggggcacgtcacacctctcctgactgcattgtaagtggccatcacgcaggcgtgtggtgtccstgtgggaatgagggatggatgggacagatgttacctgaacagctgatgtgggcaggacggtgccttaktaaagacatcctttcaggccctgggccactcccctcccaaggccaagctgcacaggggagttcagcctcaatgtgaaccctcctgaagccaaaggctctcccccagcttccgagtttctcagttgctgccggagggagtggggctcactcaggggctggcgctccttattgggttggtttatgtcagcctgtcaccaccatgaagttaggatccttccccggcagcaggtcccctgcaaaagccatgggcccggaaggcagccggtatgccaggccagagtcaggacccacgttgctgccgtcagcttagccactgcgagggttgtgtttcctgcagtagagtgtcagctccgggtgacaggtgacggcatttcatcccatcaggtgtcaggaggacccctagccaccccctgtgtaactcatcctccccgaagccagtgtgcacctcacatccttgcgggcgcgcctgcttgctccctcacacaagtgaaaactgacgccaccctcatccacccttcatgtgtgaaatctctggcttcatttcctgctgaggccgccactgggtgcccagtgctggcctgaggggccagcgtgcgacctcgtcagcagggccttgcatttctgacaaggactccccaacatgtgcggctttgcgccccacccagatggtgactctcttgccctccctcttgctctccttcccccgcttcccttcctgtcccctgactccccacagagcctccaggcaggtcctgagctgctcagatgccctttctctgacagtctttgcctggaaggaagacccttctccgagtgcccgccatcatcctttcggggactcactgcaggctgcaggctgaactggctgtggctgctctgggcgccccggtggggccccgcccgcctccttcgcctctgctgctgctcctgggtctgaaggaacttgctctttgtcagcggagggagacgccgcactgcgtgttygcaggcagaaaggaggttccacttgaggggaactctcaagctttttgaccaaagccccttagggcagcgcagaaacccacagagcagaacctcagatgcctgtgcccccgagcttccaacctcagagcttcccttggcctctgccaggcaggctgtgccctgggctggtggcccaggctggttctaacgctggagccagggctctgacagggaggtgaggagctctagaaggctgagctcacggccgcactgttcctggtgctgcaggctggcgacagcattggtgatacggctcctggtactttgtgaggccacctggattccaggagtagattggctctcgtcccatgtggggccggaagggaggtctgggctggagccaccagtccaacaagtctatcccagcccagcccaccctgtgctgagaagcacagaattgtggcagttctgttagatccgatggacgcgtggctcaggtagtgcccagcagctgggcttggtctcagcccctgccttgtgttcttccccagcaggcgtcactgctgcttagactgccccattctctcccggagggcacgcgagcccttttatttcttttacacatgctgttcctgcttgactgttaagttgtcgcttcctccctgggtctctgttctccctgagggaactcatccagtgcaccctcccatgtctgagccgtgccacccttcccgcttctgagcgccatcccatttctgagccatgctgcccttacccgtstctgagcagcttgattgcttgagccggaggattccagcaggttccttttttcatttccttcacaacttggggcttgagaaattccatcacccctgccatccattccaggcraagcaggaggtgtcctctgagtaatcagcccatccccaactctgttcagagtctatcaagtccagccctacctgtctcctccacacccagtgtractaggactcaccagccacactgaccaagggcgagtgctggcttccagggggcccacatgctgttgcctcctctctgggggcagagccggcaccgaggctgccagagatccccgagggtcaggctttgcatcctgagcagggtcttcctccagccctagaggaagctgggacagaagggtttgctcgcagtgcctgccccaccacccaggcaaggctgtggggcctgggtaccaagccaggaaagagcagagtggaggcggatgggccccttttgcctgaacctgcagcggccgcctcacgtcatggaagtggctgccctcacacgcacgttccctgcgctgcccagaccctgggaaagacatcctaagagtgcatcaggtgccactgtaccccttccatcctttcagtgaggtcacctgcacgttttgccaaagtctgatcagtcacggtcatagaaaacgctttcccgtgggccacggggcttcctgggcatctttgtggcacacggtggtgggcccgatgcacctgtcctgggtcagacgaaggctgagaacccatcgccgttgaagtcggctttcccctttccttcctgcgtgaaccctgagagcactctgtgtgtcactgcgggcaactttgcacttcattatgaagaagaatgctcttagagattttgctgtattttttttttagctcatttaattaaaaaaaataacaccactttggggaacctgcttctcacctgagcagtcctggctaggtcccgacatgaggtcacgtttcacacccagacatcccctgtctcttgtcacctttctgttctctaacgtgatgattgagctgcagggctgctgtggttgttaaagagggtgacatgtttgagtcagaagcttttgcagagatcactgttaaccgtggctgacgccttctcctcggagaggctcctcggatagtgcctttgatgtggggtgcagagctgggraagtgactcaaaggtgaatgacttgtggctccccagggacgcgtccccacagacaggccagtggtggctcttgtgagtgatgagtggtctccctgcctctcgagcatgaccttggactctcttcccagagtccgggcrtctgacgcgtccatgtttctctttgcagacgttggacctctcgaacaaccagctgagcgagatccctgcagagcttgcggactgccccaagctcaaggagatcaatttccgtgggaacaagctgagggacaagcgcctggagaagatggtcagcggctgccagaccagatccatcctggagtacctgcgcgtyggaggccgtggtggcgggaagggcaagggccgtgccgagggctcggagaaggaagagagccggaggaagaggagggagaggaagcagaggcgggaaggtggtgatggggaggagcaggacgtgggagatgccggccggctgctgctcagggtcctgcacgtctctgaaaaccccgtacctctgacagtcagagtgagcccygaggtccgggatgtgcggccctacattgtgggggccgtggtgcgaggcatggacctgcagccagggaatgcactcaagcgcttcctcacctcgcaggtgggtgcccgtgggggtcctcagatgactgggacagaggtgygagacgccgcaagctgggacacatcctgaggcsagcgtgtccgaaggagcagcagtggagtatggggcccagccgggtgtctgtgtgcttcagtttcctcagctccaaaaagggaatagagcaggttctggctcaggtgttgctgaggagggggtaaggcctcagtcccctccgggaggcaggtgtctccagcgtggagatggcctcttcacagacgcctgcaccctggcctggttggtcctggtcactggtcgtatcccttgctcctccacatatggtgttaacggtttatcctgattttttttttttaaggagtctcgctttgtctcccaggctggagtacggtggcgcagtctaatctcactgtagcgtccgcctcctgggttcaagtgattctcctgcctcagcctgctgagtagytggcattacaggtgctcaccatcatgtctggctaatttttttgtatttttaaaagagatgaggtttcaccatgttggccaggttggtcttgaactcctgacctcaagcagtccacccrccttggcctcccaaagtgtggggattacgggtgtcagccaccacacctggcctatcctaatttctggatagctttattgcagttgaaaatcagggttccagctggtgcggtggctcacgcctgtaatcccagcacttcaggaggccgaggtgggtgcatcacctgaggtcaggagtttgagaccagcctggacaacatgacgaaaccccatctctaccgaaaacacaaaaattagccaggcgtggtggtgagcacctttaatcccagctactggggaggccgaggcaggagaatcacttgaacctgggaggtggaggttgcagtgagccaagattgcaccaccgcattccagcctgggtgacacagcaagactccatctcaaaaaaaaaaaaaaaggaaaatcagggttccttgattttttgatattttggtgggttttctgacttctgcagtaaatcacacattttgttttatgtaagacagtattaaagtcatcaactcttgccagcacattcttctgtgaattgtttaggttttggcaagactaacttcccagttgcttttctgtgacacctgaccaacttttaaaatataaagcacctctgtgcccaggggaaagtctcgtgcgccccgcagtggcagcgacagagcatggcgggccgagagtgactgtcgtgagagtcctgcctgcagcttggggaggaagggaacaggcatcacagccagggctttacaacttaaagctcagcctttatttacattttagttcaagatgggttctttgaaatctcaaatattatgtcagaattagagaaggaagaaagtctgctgattgataggttaagatagttttcctgatggtgattccacaaagtgagtgcctggctggccgggtggagaggagttggagggsagccctgtctcggaaaggggcgtggcgtggttgtgaagaccttggaccgggagggtttcctggcacacagcccagccaagggtgaaktgtggacacctcgctgggcttcagggcacaagagacyttgctcatcactgcttctgtgttacagaccaagctccacgaagatctctgtgagaagaggacggctgccacccttgccacccacgagctccgtgccgtcaaagggcccctgctgtactgcgcccggcccccrcaggacctcaaggtgctgcagcctcctttgcagggtctgctgaagagtctccttggtgtcgaaagacgccatgctgctactgsagcccgaactttttttttttttggagatggagttccattgttgcccaggctggagtgcagtggcacaatctcggctcactgcagcctcygcctcctgggttgaagcgattctcctgcttcagcctcccgaatagctgagtttacaggcatgtgccaccacgcccagctaattttgtatttttagtagagacgaggtttctccatgttggtcaggctggtctcaaactccaggcctcaggtgatccgcccaacttggcctcccaaagtgctgggattacaggcgtaagccaccgcacccggcctgaacattttctttagagtaggatccgatgctgttcttgcaaagacatgaaataatgaaacagaccgcgtttgcggttactcgaagcggtgcacagctgtgagaggactcggcrgatgagcagtcgtgggaaaatggtttccttcactcgctcactaccttttaatcagaaattttggtctctgtccygatagtaaaaccgtttgcgtggggttggcagtagggtgagttgctgtgtcgtgctgtcctgggctgttgaatctgtggagtgcacgaggtcccggctgctcagcctttctctcctcttttggccttctgaggatggcagacctctggaaacagttgtgcatgagctggctttaaggttaagccctgcctcagtaggatcggtgtgtttgggcgtcaggtctccccgggacgctgcagtsgcagcccacatgcagcttcttgctgcgtggtcccgtgggatgctccctgcctgctgtagagatgaatgagggcgggagtcgggagggctcattgaggcttaaggccgtaatcgacacgatgggcgagttctgtggctgtgaccctagtggagtttgtgggtttctgcccgatagattgtccccttggggcggaaagaagccaaggccaaggagctggtgcggcagctgcagctggaggccgaggagcagaggaagcagaagaagcggcagagtgtgtcgggcctgcacaggtgggcagcgtgcctggtggggtggggccgggcccgggggagtgccgcatgctggcctcagctgagttagtctgtgctcctcaggaaccgcctaatgctaccagaacccagaagcttcttaacagggtamaaagaaagcattctctttccaaaggagacgttgtggaaccagtctgtcatctagatggccctgacgtgagggaagtggaaggtgttaggagcggaggtattggccattccacagggggcgggtggccctcaggatgggacaggacaggatataaactagccattaggaaacagacataaatgccagcccaacccacagcattttatccataccgtgcgctgttgggtatcatccaagtcagggtccttggtgctgctctaagcaagatgatcatccgtaactagcccagtgatttctgtaaacacaggctkcagaatactttgttctttgaagcttgttatgcttgggcccttgatattacacttaatttgtgtaaagaactttttgagtcgtccattttaccctttaggtatgttttcaggtgtgtgcttttttttttttttttttgagatggggtctcactcttgtcgcccaggctggagtgcaatggcacgatcttggctcactgcaacctccacctcctaggttcaagcgattctgccgcctcagcctcccgagtagctgggattacaggcgcctgccaccatgcctggctaatatttgtgtttttagtagagacggggtttcgccatgttagccaggctggtcctgaactcctgacttcaagcagtctgcctgcctcagcctcccaaactgctaggattacaggcgtgagccaccacgcccagctgtgccttttttctttttttttttttttaagatgtggtcgcgccatgttgcccaggctggagtgaggtggctamtcataggcgcagtcccactactgatcagcaccggagctttttgtcctgctctgtttctgasctgggctggttcactcctctttaggcagcctggtggtcctccactcccaggagctcaccatagtgatgacagacttagcgtagacactccattggcacagcacaccccagccaactcctgggcccatgcagccctcctgtctcagcctcctgagtgctgggaccacaggcacatgccaccacacccagcacagtgtttcttttataattatgcctggaatttgtatttcttcccatacagataccttcacttgctggatggaaatgaaaattacccgtgtcttgtggatgcagacggtgatgtgatttccttcccaccaataaccaacagtgagaagacaaaggtagggtggcatgtgtgtgaacatggtgtgtcttctaggctgttccctgtagaattaacacaagtctgcggggcgtggtggctcaacaccggtaatcccagcattttgggagaccgaggtgggcggatcacctgaggtcaggagttcaagaccagcctgaccaatatggagaaaccctgtctttagtaaaaatacaaaattcgccgggcgtggcggtgcatgcctgtaatcccagctactcgggaggctgaggcaggagaatcacttgaacctggaaggctgagcatagtggcacatacctgtagtcycagctactcaggaggctgaggcaggagaatcgcttgaaccccaggagacagaggttgcagtgagtcgagatcgcgccattccactccagcctgggcaacaagagtgaaactccgtctccagaaaaaaaaaaagaagaggaagaaagaaaaagaattaacacacacaagtatctgctgcattgtgaggtttcattgtgtgcaatagaaaacgcagcccagaggggtcaaagggccccctggcttctcagagctacagctcactgttcatgctcggtgctgcgtgacggcccgggatgctgtgtgcagcactgcagtcttcctctgtaaggagtgggcttggtgtgtgtgacgccatctgcttaattgattgattgagataggtcttgctstgttgccgaagttggagtgcagtggcaagatcatagctcactgcagcctcaaactcttgggcttaagcgatcctcccatgtcagcctcctgagtagctgggaccacaggtgcatggcaccacacctggctaatttttgtatttttttgtagagatggggtcttgctgtgttgtccaggctggtcttgaactcctgagctcaagcaatcctcccacatcaacctcccaaagtgctggatttacaggtgtgagccactgtgcctggccacacagttttgtagatttttcctgagaacaaatgttgsagttgctgatgtctacatttgataactgttcttttctgaaatgtttttttcttttaaggttaagaaaacgacttctgatttgtttttggaagtaacaagtgccaccagtctgcagatttgcaaggatgtcatggatgccctcattctggtgagtgtggggtggctcctcctgagaaacgcttttgagcgtgagtggtgctctgctcyttgacttcccacccgtcctgcttkcctcttttttgcttactgtgttggcagacagcagcatgtcttccctgggtcacctctcatctccaggttaaaaaggtattttttatttgcagaaaatggcagaaatgaaaaagtacactttagaaaataaagaggaaggatcactctcagatactgaagccgatgcagtctctggacaacttccagatcccacaacgaatcccagtgctggaaaggacgggccctcccttctggtggtggagcaggtccgggtggtggatctggaagggagcctgaaggtggtgtacccgtcyaaggccgacctggccactgcccctccccacgtgactrtcgtgcgctgacgccagggccgcctgtccgcgtttgtttggccggttttgcggaggtttctatgcggcaatgctgaattatccgttagattttcaccccagtttttttgttggtttttttttttgagatggagtctcgctctgtcgccaggctggagtgcagtggcgtgatctcgastcactgcagcctgtgtctccygggttcaagcgattctcctgcctcagcctcccaagtagctgggactacaggtgtgtgccactaagctcagctaatttttgtatttttagtagagacggggtttcaccattttgaccaggatggtcttgatctcttgacctcatgatctgtccacctctgcccctcaaagtgctgggattacgtgatccacccgcctcagcctcccaaagtgctgggattacaggcgtgagctgtgcctggcccaccccagcattttttaagatgtatgtattcgttgttctgtttttccagatgattctgtcgtaaagtgatgctatgttgtcgttamaacatcaaagtgattttacggtttttgatgggattattcaagtgtcagaattaactgttcaaaatgttctgaatcatgtagatacatggcaggtaactgttyatgggagaaaagtacagtgctgttacgtggcactgtacagtcatgtgccacgtaacagcgtctgggtcagtgacggacacttacctgacagcggatccacaatattctcgtgcagtgtgtttggaatcctggtctgggctctcgkcgttggccttgtagatcaagtaggggaagtgagtgatgttcagtcatgctgctgggacacttggttttccagatgaaaacacataaataaaactacatgcaccatcgaggcttgtgtaargactcygtgatcacacagcagcggctaagcacacgtttctcatgtgtcactgagcgacacgtgactgtcactggttcggagacccgaaaacttgggaagccaaccgatgtgcgtttccttgaacggcacggtcactttctatgacgcagcatcttgtaaaaccatatcatgccaggatgcagcttggcatgtgcaagggcgttgggttctccagctggcagtgatcataatctyggggggaaaagttttaatgtgaccttagaattggcagaattgcrtctcttcatactgctgttggattgctttgtgggggtggagatgtggagaccccttcaggcaagcagcctgtaggctgaaggcagtggcagcacctcaccctggctcagcggggccaagcggaggagagcggcatcggtggggtttccatcgtgtgcacgctggtgctgcagtgacaggcaggtggagccccaggagtggaccagacgcctctgcttgggaagcatcggcagtcctcagccagccgagggacagatggtagcaaaagctggaggaygcttaggtttttgagccaaaaatcttcatttatgcgccagaaaggtgggtcctgggcgccttctgttgtagacgtttccgttgtgaatgtccaggtcagacccccacgtccatgtgtcttcgtgtatgtccaggcaccacatgtgcgtgcacaccactcccgggagtcagtgtgcttggctcatgaggacacggccagccaccgcgatgattttacrgaccccactgccttacgatctgggtgccatgtgagaagcagactcatcagctttatcgaatgacaccatttgttctctgttcagtgtctcgatttctgtrtctgtagaaatgactggtgattttgggaagcatctgcaagagccccacagcccacacacctttagttgtcaacctgagaggcccggggccctgtgcagtgggcagactaacagctgggtggctcttcagagccttgcaggacatgggccaggctgccttgagacctggacccacttgtctggtcaccgccaggccttcccgtctcgcccactgtgggagggaggggactccagacaggacgaggcccacacactcagtgccagctggactgccgtgggtgtgtcagatgactgccttgccttgtgtcctcccaaaacctgattcctgctgctctgggcmgtcaaggcagatgccacagttggccaggggcctgccctgctggaggcttgaggcggcacgggggcttccccaggccaggactctgctggagttctggggctggggaccccagacagttgctctgagaggtgatttrgggctgccatggcagaggctgccctttctctgcatggcccggcccagcccgggaaggaggaagggaggaarggagggatgctggagctgccatcttggctcccggggacttggtgtccatgctgtaacacatctgtcactgcgtgggtgtggatgaggctgccacatgctgtgccctttcctgatgcagcttgtgatgcgtgagatgctggaaatgtatttaactcgcagcacaggtgtctctgatgttttcttcaccccaccccaccccccgactcactaataaaaacagctccgcacctggcccagcagatsctttcccaccggcactgccagaggttgttgctcgaagtgtcacaaagctcactctagcccagtggtggcttctatgtggggaggctgagggcctcctgtccccacccagatcttgccagcagggagcaagaggcacctgccactgtcatggggaagctggtgcccttgaccaggggtcctgggaactggcctcaccctgctgggcccctgcctggagcacaaggtggaccagaggtgtcgggctgcctggataccccaggtgcacagtcagaggagcccaggccccagacgcatccacagcagatcctcctgttyrtgagtctctgggagggtaggccaggcggccactcagcagggtcctgtcccatcctctccccaaccctcccagagctgtaaggacactgctcagctcagcctaggtccatgaccctgggggtmctggggctggagctgctgtctccacyatggtcacttaggggacaagtggtgtgcccgagaggcrgctgtgggttacttgagtgcctggcccaatgagcacccgtgggtgtctgcctgtagcctcccctgctggggctggcagggctgctggtggagcccctggctgaagatgctgggcccctgccagggcggrcccagatgcagccagacagatccagggcagacccgacatgcgcctgtgccatctgatgccagcccctgacaggtgggaaggagcatttgtgggggtgcgtgggcatcactggcatgcgggacccgyggcagaagcaccagggccacttcccctctgactgtagaactgggacagctcccatccccatcctgtgccctcgcctgtctcctgggccgcaccagttcttggggaggcccagccccaggacccccaggtcggagtgctgccttctggggcccatgcagccaaactgctgggcccagcggcctctgccacttccttacagcagccccaaggcagtgctgtcctgtgaagctgggcttcagggagggtaccagctggctactcctttccctccttgggagtggcaggtcagaggtagggatctctttttgaagatccaggctgtcatggggctggggcaggcagcagcccacccaacaacaggctcccaggaaagcatcattgcttcagaccgcagcccaggacaggcccttgggctccctccttgggtttggagccaggagccttrgggcagtgtgcaatcagccatgcagctccacctgccaccggctggcccaggcagatctcaagtgagcctgctcgccccaaaggcggatgatgtggagtctgcctccctaccaagactggcgcagcccctcctgtttacctgacttgatgctttmggcgggacctggcctggggcaggcrcagcctcagccctccaataacctcatctggccctgtggcctcccttctctgtgcccgtgaggatagtggctgcccgtgtctcccacccccagccctggggtgaggaccccttccctaaggggatgtttctggcaaggctttttgggatcttttgtggtaggtgagggccaaacacaagacccaggaaagcacctaccaagagaatggaggttgggaccgggggctgggactggaggccaggatcggggtggggggaatgggaccgaagtccctgggacacagctgaggtccagccacatccgggtccccaggcctgccggctgtcctcgccagagggcccaattggtaggggtgcattcctagagccacatgggaggggggcctgccccggggaaacaagcccttcccacagccttcctggatgtcacgcctggccaggtaactatggcaagggctgtcatccaccgttcattcaacagacacttaatgcctctgtacacaggctcttggcccacaaggagtacttggagggaccaggcccatccctggggagggagggtagacccgggtcctccctggcagccgccggccccaagagggacacacccagcctctgcgcgtggtgggctgcctaggaagaactgtgcccacttactaaggaagatatggtgcatctgagacaagggcgggggacacayagccacccttacaaaaccaggagtcagaaaggcccagagaggacaggggcctgcccagggccacacagctctgcacactgctcccacggaggaaagcagccgggaggatcccaccccggggggctgccagggaggtgggctcggtttgtccgctgaaggaacccctcatcctggccttcacaagggaaggggctgggccctgggagagaggaggctgtagctgggggctccaggccgcagggcccagcctgggtgtgtcctgcagctcctgctgaggctgggcccaggcctcccagccacgtgtgcccagctgtttgtaggtcctttgaagggctgtgtgccaggtgtttgtgcgcccccgtgtggggccgatgacagctgtgcacctggtgtcttcgtgtgcctggctgccagcgcgtgtgccctgtgcgctgtgtgtgccgcagggtccgtgtctgtgggggggtccatgtgtacaaggggtgtgtctccaggcctgtgctctcacgtgtgcggccagccccccgcgtgcatgcggggcagcatttatttgcacttgtgcacatagtagcctgtgaggtagcccaggatgaagatgatccagaagagggccacgccgcccagcaccttcatggcgatgcccagcttgcccgtgcacagcctctgggagatcctggggtgagaaccaactggaggtgagccccaggccagggccgcatgaggggccccctaagtggactgtggccgttggtctgggtcagggggaggggcctgggcgctctgctggagtyragaggaagctctccccgcccacagccaaccagagggaaggccaaaggctgcggtttgctgagctgctggaccgtgggctcccagccaggatggggtggagggtgatggggccggtagcaggggttagggcaggcgtctctggagggagacaccagcctgctatggctggcaggctgccctcaggcccctcacctgcggcagcgtgaggcctcttctgtgctggacacagcccctaggctgactccgtccctgctgccgtcctcccacctactatagtggacgtggctctcctggggctgcatgctgtggggctgcagcgggaggggcggggccttctcggtggggagatcaagacaggtggccaggctgtggcttcactgtaaaacaagcggatggagggcggcagtcaagaccccctctgaggctgctgttaggagaggggcactaagggtcgggggctgactccctcaccgggtctgtcgcctgacttaacaggtgacctagacacaaagkggtagagtcatttgcccagggtcaggccgggaggatgggaccaagcgagaattccatctcaggccaagccctgacctcaggcatgtgggaggccagtgtttccttccagcacactccaggagcctcccttcccckgtgcttttatcagggagcctgcacagcctgccaccctcaagagacgaggacattgtggcccaayctaggctgcagcccctgataactgtccccctccttaaycctgcccgataaggcgcctkctggcctctggggaggctggccaggggagggggggtgcgtggggcagggcagcaggtccggggcagcggctggtacagctagaccggtccctgtctggggaggatgcgtggctggccccaggcagtggcagcagctgtgtcctcagcctgtgtgggttgcagcccctcccccacccacacctctaggagggctggggcttggggggcaygatgcactgagcacggggccgggrtggattcaaggccttggggaggccctacagagacaggagggtcgtagggctgggtggctgcccagagcaggaggggcccggccccaaggccagctccctgctgggctccaactcctgcagacctgggactcatctttgcatctcggcactcagctcggtgcctggcagcccaagtgcccagaggggcgaggagaccacggggactgagcaggaactccaagcactagcacagctgcccggccggcctgagccagcccggactctaagcacctcctttaccctctggcctctgtttcgacctcctatttacctaagggggtgtgggggtggaggagttggagggggcacgagaagttgacaacccacccaggctgtgggactggggtcagctctctggtctgctgggcccccagtgtcccctctcagcatctggcccccaggagtggggtcctcgggcaggcaatggcaggcccctcacttctaggagctgaggctttgctgggccccctccagcggggaaggctgaccttcctcccaggtcatcggcacagaggcctaaaggcacagcagccactcccctgcaagaagccagctcagaaactcaggccccaggcagttctgagactcccggcacttccatgtctgccttcccccaaagcccagagaggcagaaggagctgtctcaaagccataaagtgtgccttcggtgggagccctggctcagtgcagcctggcactcaggcccggagaggcccagcctctactggagtatgggtgctgttttcccggagcatgtggagcggtcagctgcctacccgaggttcacgccctcttgcctggtgtgcagaatcccattctggtcccagcagcaatgtgccagccccaggtaacagccatgacccgggtaagacaagcttaataccaccacccctgctttcccaagtcacccagctggggtccaggagccagggtgcagcaggggatgggagagtttgcttctgtgaaagcagcagcagccacctccttcttccagactcgacgtgatggctggagctgctggagctgcagcagccgccttgcaacccgacatccacgcagcattagtctcgggagtgctgaggctccaagtccacagcagcagcccaccatgggcctcccggtgggaggggtcaagcccagtgtgttcaactctgggatcatgggttcctgtcttgctgacgtagaacacgttgttcccaagtcaccccggtgcacagccaccagagccggcccttgaggctggcctccctcacttgctcagtaaacgtctctccacactcatgtgatggtcacaggtgtggcggcaggaacycatcagggactcccctccaggccctgggaggctcccrgatcctggcacctcctgggggcttgtgagtgcaggaaggccctaggtacacaggcgcccctccatagacctcttcaccccacagcgcctcagggccccacacttacccggagaaccttgcctgagggctggggcctctgggccaggttgcggtcagggcctggccagcggcccgcacctcccagcggggcaggtcgtgggctgaggtgcggcagacgcctcgagcctaaaaaaataaaggtgaccggagaagccgatcttgctaagggccgggaagggaaagtggctggtgtcgggggtccccagcagccacaaggagccgggcaaggagccgggcgggcagttccggccctggccccgcaccgcgggttaggccggtgggggtcagtccagggcacgcccccacccccgccagttctcagccagcgaggccgcgcacagtcgyacctgcccactgcggccgcaccgggaagccgcagcccggaccccgcgcgcctcacctgtgtccccgcgtctctgggctccgcaggggccgggcctgggcagggggcgagggcgggggcggggccacgcggggaagggctggagccagcagcggggaggtgtctggtccggaaggtggcggggctagagtggtgggcggggccatgcggggaaggtctggggccagtagcggggaggcgcctggtccagaaggggccgggggcggggcgagagggggcggggcgagagggggcggggccatgcggggaagggctagggccgcagcggggaggcgcctggtccagaaggggctgggggcggggcgagtggggccgggagacgcctcgtccggaaggggccggggctctaggccgcccagccccggggccaggaggtgcaggggggccgggcagggtctgcagagggctgcactttctgcccccagacggctcgcccttggggcctccagggtccccgacctccttcacccctgctggagcccctccgacgccacgagcctcccagccccgcggggacccggctgcagcgccgacgagactgcgggaggctctgggcgcgtctgggcctgaatgctgggttcggggacccggccgcggggaccgtcctcctccggggcttgaggggcgtggcgcccgcacgtggcccacgctcggtgctcgcggcgggaagggaagcaggtgtgggtggggagcagagaagggtratggggagagtcccttccgaaggtgttcaggcgcccagagcctcagaggcgccggggaagcgtcggggaccacagacaccgttcccgtgcgtaaagctttccttccaggagcggggggatgggaacagagccccccaccctcaccatcttccagaggggtcctccagcaagagagtgccccagccaggagagcccccagggcagaaggtcacagaccccttctgctcaggcgtgaggtctgtgctgagtgctgggcggacaccccggctcaggcctctggcagcctggtgccgcaaggggacctgttaggagctaggggcwcaggctggtgtgctgactccctgtgagtgagctttggaatggggagtgtccttgtagctcaaggtcgcagaggagagtaggcccccgcgtggatcccagagaagaaaaaggtgggacagtgccaacaccggggtttaattctgagtctgagagcaggacgcatggtgggggcgggtggttctggagctgggccccggcctctgctgggctgaccgtatttgggggcctggctgggcctacttggaggtccccttcttggatttgctggtcaggaaggcctstgactgttgcagsgggggcactttgacgcctttctgcttcagctgattatagtagtcgcttctctctgagataattctctacacaagaaacacagccgtcgaggtggccttcccagttcctcaccttggccttgaggccggtctgcacagtccgtgccagctgcccgggacgccaccctctcctcctcctccagagaggcttgctgyagcaggggtgtgctggtgaatacttacaaccggctctccagggggagaaaaaacaaacaaccctcggctttgtggcgttgccagtttctgtggtggkaatattcccacagtggctgattttcagccacggaagtgaagtcacagaatgcggagccgggggcaggtgcacaccaccagcccgcagaagcctgcactaagccccctcttcagccctcttagagttgtgaggagccccagactcctagagatctttgaggtcgtcacatctgtccctcaagtcccttctgtcctgtacagagggaatgttgtccccacctctcttccattctcctctctgggccgttgctggttcatgtcaggctatggcaagcaagcaaaggtgctcttccctggctactgtgcggtgggaataactccctccatcctctgtcttccctcttctcttcctctttctctccccttcctcctcccctcccccagacaacagtaccaaggccgcagagacctctctccacattacagctctgcaggagaggcactgtccagggccccccactctgcagaggaagggaaccaggccccaggaacgtgggtgctggaaggtcaggggcacacactggggttcaagggcagccccagagggtgaagtgtgggtcttgggaacaaaagcagctcctggtgagaggtgaccccttcgtagtacacagccccacacagagccatagccggtgcccggctcccagagctctgagtcttacgacaccttgcaggtgagcatgcgctgtccatcacagagggaggcatctatggctcagaaaagtgagtgtgtggcccccagctggtgggtggtgaccccctcatgcccagtgaccccaaggcctgaattctcctacacccctctacttctccgaggcccttgcttggggacccctggtcaggaaggagcccaggaggctgtggccggggtgggaggggtctgcaccagggccctggatcagtgggtggtgataccagcggaggggaccaagctggacaaagccggggctgggctcctgctgtgggagaatcttcgtgccctgagcggcttgtcccctctccacagcgctcaggatgggttgtggcagttactgctggtctctgatgcccgtcccccgttttgctgagagtagctaagactcccgtgccatgcccccacctgccttaggatgatttgatcccctctgcctgagctgagagaaaggagggtcctggggtccaagtgaataggtgacacaggtaggatgagaacagagtccctggaatctaggccccccacaaccccctaccacagctctggcctgggggtctggggcccggatagaggcagctgagcttaggggtatacctgcagggcttccaggatgtcattgtcagagatctcgttggccaaggacttggtcccggagatgctaaaggtggcctggatgatcttattccttaacctctcgagctgtgagcaaagggacaacactatcattygcctttacccaagaaggcacctggccagtgggctgcaccccccaccaccttattttttatgtaccaggaaggaacagctcaccctcacttttcatggctttagaaactggaaacaggtgtcagagaagtcaatgtggattgtctgagagctaggaggtgccggatccaacccctgaccctgtgcggcccagccccaaagcccaaagactctcctacaccaggtgggcttttctaattggaaagtaaaacctacacacacatatatatatatttttaaaccaacaaaccaaaatagtacagaagccgcacgtaacccctggaccatcctccactgcccaggggagctgcagtgagcggacttcctggcccttggggacactctcactttaggcatttaacagtgcgctgctggtgcttcctcctttccatgctgactaggaggtgtctgtgccatggacagcagcgttgaacctggcccccgcgcacagacccagaaggcgttctcgtcttctgctgccatgaagatccttgtctgcctgtacacccgcagccgcctccccagaggtagctaatcgtgcctcccaggaagctgcagaggaaacccctccaatctgcaccccaggagcctcagacaggaaccccttgagttatgcggcacgctcagcacgagttcctcgtccagaaaccctgacgacgcagaggtgccccacaggagctgggcccgagaggctcagccttgcctccgagtggaagcatgtccacactgccgctcggacaggtttaagtgacagcaggaatgtcatgggcccctggcctgtgtgaggagtggaatcctttccttctttccagtatttattgagcgcccaactttgtacaaacaccgtgccaggtgctggaggtcgtgaggtcacaaggggctgggcctctgtactgggggtccctccccagggtagaggttggcagctacccggggtgtccagcctcacttccccacacccgtggggcctcaccatcaggcttggcgctagttcctgctcacccggacttagcttcacaatatttctcagctcagctttccaggctccaccaggtcagtgcaggctggcgcacaaatggacacacctagaccgcctctggtctaacgctttcaccaggactacggctggatcccaaactgttttatcaagggataccaggggtgggtgcctcagtctgacccagccggaaggaggtggactcaagcaggaaagaggacgcagttgagttgcagttggcatttctggtgggaacctgacttcaaaagcctccatacatgaccttgacctttgcttaattttggattctaaatcaaggtcagggccagkcacggtagctcacayctgtattcccaacacttcgggaggccaaggcaggcagattgctggagcccaggagttcaagaccagcctggacagcatagtgagaccgtctctacaaaaagcttttaaaattggccaggtatggtggcacatgcctgtggtcccagctactcaggaggctgaggtgggatgacgacagcttgagcctgggaggccaaggctgcagtgagctgttatcaccccactgcactccagactggatgacagagaaagaccctgtctcagaaaaaaaaaaaaaaaaaaaaaaggtcagctctttattgatttcctttttggcatggggccctcacaagcagggcacactctggccttgctcacgtttcatatgacaccccagtggagccctgcagttgagactgccaaatcccagcaccaccgcaaagcaggtctgctgtccagggggactgttcatcctttcctatttgtctactaagtgaggatcatgataactacttcgcagtctggttaaaggagctacatgactttgataccaagaaggtacttagaatggtgcctggtccagcaagcacgctatgactcagagatgaggggggcaacaccatgcctccctatccaggygccctcctcctttccagccagtgatccaaccccttcacaatgcaacccaagacccgcagccctgcccatggggctccgcccaccactgccattgacgaacatttccgggctactctgttgcactctcactccgtcctctacccacatttcttgagtgtcaactctgtgtggatgctggtgtacacggcagaaccagcccgagccccagcgtacwcagaccccggttctacctyggtgggcggtgggcagaggcctgggtgctcggccgccagctgctgggacagaccctcaggaggaagggctgggcataccctggactgggagctctccagggccacgcgggtgtgctgctctgcctgctgaatcatctccttcttgctctgcaaatcctcctgcagctgcttccwcctctgcaggtggttctggtccagttccacctgctcctgcagctggctgaccttggtgtccaactctgagatgacacagtcccgcttggtgagctttctctccagttccgacacttgctggggacagccggggagaaaaaagaggtggggtcatttcgcccaacctgagtatgtgtggcacccatccactttttcctaaaagatggccggcggccaggtgcagkggctcacgcctgtaatcccagcactttgggaagctgcggtgggcggatcacgaggttaagagattgagaccagcctgaccaacatggtgaaaccctgtctctactaaaaatacaaaaattagctgggcatgatggcaagtgctggtagtcccagctactcgggagactgaggcaggagaatcacttgaacccaggaggcggaggttgcagtgagctgagatcacaccactgcactccagcctggtgacggagcaggactctgtctcaaaaaaaaaaaaaaaaaaaaaaggactgggaacgcttgctgggtccctccagtccagtctggacccagcaattgcgaggagccttctgtgtggacgtggggtgcagagatctgtcgagtggcatgctaccgaaggggtcctggctcagctgtgaagacgctccagccccgtcttgccctttgctgtgttgggacttacagtaagaacagtggcctggctgatcatttaacgacacccaggctgtcacctgtcggaggagctggttgtccttttcaatgagccccatcatctcttggtgtttcttatcttctcggaggttggagaactggaaggagacagaagggttggcttgggggactcccaggtttagataacagactgaattccggcatctaacttttttccttccccaaagctccctaaaataatagcagcgggatttctattgaaggcagggagaagagaagaagaaaaaggactaaaaatattttggagagtttgaaggtggctgagtggtatctgacatcccagatccaagaaagccaaatagccggcagtaggaaaagcagaaaataagcccaattcacacttgagttcctaaaagtctcagacattgttggtctgggttcttctaaacatggaggctaaaatgaggatgattggtggaatgttatttcagaaatgaagagccctaggccacgtgcagtggctcacacctgtaatcccagcactttagaaggctgaggtgggtggatcacttgaggtcgggaatttgagagaagcgtgggtaacatagatcctatctctacaaaaaataagaacattggttgggtgtggtggtgtgcacctgtggtcccagctcctcaggaggctgaggcgagaggatcacccgactctggagaggctgaggctgcagtgagctgtgatcacaccactgaactccagcctgggtgacagagtgagaacccatctcagaaaaaaaaaaaaggagaaaagaaaagaaaagaaactctccattaaaatgccaaagcaaagcacactgctctgccagggagcacagagtggtcacctgtgtgctcagagtccagtcaactcgaacattggagcaaagctctcagatgaatgacagacaccaaaagcaaacttgtaggaaatagaagtggtgcaagaagttagaaaactaacagtatgatgaacgctgtcatcaagggaaaatactgcaattgtgaagccaaacaagagtgcgcttcaaaaaaagaaaaatggaacactcagagaacatcagagtaaaatattataacaaaatgaaaagagctgttgataaagttaaggaaatcttctagaaagtatctgtaagagacaaagagacaaaaaggttgagataacagataaaacaagagcgggacaggaggtccaatagtgtgagagaaggccataaaaaaacaataaaaccaaagaaaattccagaactaaaggacatgagtttccagatggccactgagtgcccaatacaacagatgaaaacacaccctcaataaagcacaactctgggaggtttcagatcacctgggacaaagataggatcttacaactttccagagaggaacaaccaacccagaaggaaccatgaacgactttggacttatcatcggccaacctggaagacaacagaggaaggcctctgtgatgctgaaggaaaatggttttcaaacaggaatgctatatccaacccagatgttaygagggtatagagtaaggacatttgccaacatatcctgtccccaaaactttacccctgttcatcgttttttttttttttttgagatggagttttgctcttgtcgcccagactggagtgcaatggtgcaatcttggctcactgcaacctccttctcctgggttcaagcgattctcctgccttggcctcctgagtagctgggattacaggcatccaccatcacaccggttaatttttgtatttttagtagagctggggtttcaccatattggtcaggcgggtcttgaactcctgacctgaggtgatccacctgcctcagcctcccaaagtgctgggattacaggtgtgagccatcgtgctcagcctcatttatcctttttgataaaactactggaggatgtgctccaccaaaaataagtgaagagggcaagaaagcaaaaggtgtgggatgcagcagttttaaagttgtggtttatgaatcttagtactgttctgtaaaacttattttatttatgtatgtgtgtgagacaaataactgtcctaatgatgtcagtgcaacattgattgtgatagaatgatacgaggaggagggtggatggaaaggctgcccttgtgtgtgttggggggcggtggcaagggaggaaaaaaaaggaagcattaaataatgttaagatggagaacaatctagaatggccactatgagcatgctatttagagatttggagatagattcataaagaacgtgctggaagaatttaaaatgatgccttaggagagggcgaatgagagggaggaggtcagaggctcctggttttcatgacaggcctcgtggaactatttgattctttaagcgatgtgcatgaataactttgataagagtaaaaacctaaaacgcttaacaaaaacgacaagagtgggctcagtggagtagcagtctctctaagcacggatagggcgttcttacccccaggactcaggggccaggagatgcttgaggagtggccaagagcacagcggctcaggagacagggacacttgcctccagcccagggacagggcagagctgtggctgggcacatgggctccagcctcccacacaccttggggaatcctagcggggccgctatcagccgcacaaccctgggccagctgcctggacaccccaggctcaaagtctccatcagtagatgggacgggcagcgcctgccccgagctgccgggggttaatgaagcctggggcccatgctcatggagcggaggccggtactgagcgcacggccaccttgtcggtcatggcttgtagctgctgcctccgctctcggagctccttctgcagcgtctcattttccgtattgatctttcgcagctgggtttcttggaaatccacttgttgttgtaaagacgcaatcactcctgggcacagaggcagaggcggtgagcaggagcaagcaggggcagtgagggacagaaggagagggccgggccactgcggcagctgggagggctctgccagcctgggtgaggctgccgacacctgcccctgctccagctcactgaccagagcaggcagcgtctgggcgtcccagctcctgggccgggaaccactgagtggccaaagcccagtgccccccgccgaggccctacctgttgcaagggagtatctggtcctggtggcctccaggttgaactggaagtccaggatgacctgctcgtactcctccagctgggccagcagctcctcctcaaacgactcggccagggaggaggcccttctcctggggatctcctcttcctccggcagctccctttcctctgagtcctcatccctgtccccttcctcctcttcctcctcctcgcttccctcctcatgcacggatcccatctggctcacacctccccaggcacccgtgtcctccaccccatcgggctccccttccaggccctcgtcctcctcgccacctcccaggtcgggctccttgcccctctccggtgccgcagactcctcctgcatctgtaagatgggtagggcaggggctgggcagggctgcggggcacccccagggcagagggctctaatgctcatggcgggggcaccggggagggcgcctccttccaggctgctgcagggtccagggagtgggagagcatctgcctggcaaggtcaccaacagtggcccaggcactgtggcctctgtcacgggtcctmcctctgtcagtagactgcacctgacctgtgccttcaagggggctaacgacccacccacctcacctgctcccctggagtggggcaccccaggtcagggctgcagcagggacacttggggcctgggcctcttagttaagcagcctaggtggctcctgggcccgggtcccccactgcgtgcctgctctccaggcggcccgcacctgccaccagtgctgcagctcctcctcatgtctggagaaggccttcaggaggctcagcctgcccagcttcagcgaagcgtctgagagctgctcctgcaagacgcccgtgggaccctcagctttccagcccctcctgcagcaccccagggacagaccactgcctgtcctagaagggacagcggcctctcatgtctggggaggggacctgcatcctcctgccaaggggctgggggatgtgggtgctgtggcagtggagggcacaggaacctgcggatgggcagttctggggggcagtggggctctaggcacccccagagcagcccccagcaagtggccttgcagtaaaggacaaggccagccagccttacacacgcccactgtgcatgtcattgcctgggtggcccaccctcagacacccacccagcagcctggggaggacagagagtggaagccgccggctggccacctttccctgcccccgccctgtgtgtctaggcagccttcccttgaggcatttagggcagttggcatggtcaggggccttccccctggttcctgcttcatctctggcccccagcataaactcaggctgtctcctcaggtgtgaaagaaatcttaggaagatcaggtgaccgcccctgggcacaacacagacctgcctcgtccagtcctctgcccacacctagaggtggggtagcatccccacctgcatccccacctctaccccacccccaccccaaccccatgcccaacctcgcagggggcttcacagccagagagtggggagaagggattcctggccagggcagggtaatacaagctaccactgcagatgatgcacagagccaggcccggggaatccgcctgcagggtggcctccatgccccaggatttcacaggtgagctcagccctcattttatggataaggaccctgagccccgacagcgttgtgccttgccccattcagaaagcaagtcagaagccaggtgcaggtgcctagacatcggctcacggctctcatttgtcattttgcgcctccattcatctctcccccscctgttgcatcagctcatggctctcatttgtcatttcgtgcctctgttcgcctctcccctgcctgttgatcagaaccctgagaaccggtccacgttccagtgaggacctgataggatccagggggcctgggggtttgccaggggcctgtgtgtcactagcagctttggacgctttgaaaacaaccgtcttagagctctgcgctgtgccccgctggggctggctcaccctcctgcctggggacatggatgtctcttggcctttgcctttcagaaggcatttcagctgcrtcttcagggcctccctctcctcctggagcagcaggatctcctcgtctttcttctgaacctgtatctccagctcagacaggcagtgatcctgggcagaaaaccaagggcagcccccgtgggccatgcagccacacactcttcccctgacctgcctccagcccacccaggaggagcagatctgctgtcgtggtaccccaaaaccccagggtcccagggatttcaagataggtactgcggtaaagagctagcactacacatctggagatcaagatgtgccagctctttactgcagccatgcctggcacctccagcgcctctgcacccatcctaagaacagatcctaaatcctcgtccgaggagttgcaaggcagcttccctttcggacctggcccgtggtgtgtccctgcaccccactataccacaggacaccagtcttctttgcagccccgacacttaaccggcaacaccctccaagcttccctaggggc

SEQ ID NO: 94555 - DNA, 16281 bp, Homo sapiens
  misc_feature (1)...(16281): n = A,T,C or G
nnnnnnnnnnnnnnnnnnnnnnnnnnnnnnnnnnnnnnnnnnnnnnnnnnnnnnnnnnnnnnnnnnnnnnnnnnnnnnnnnnnnnnnnnnnnnnnnnnnnnnnnnnnnnnnnnnnnnnnnnnnnnnnnnnnnnnnnnnnnnnnnnnnnnnnnnnnnnnnnnnnnnnnnnnnnnnnnnnnnnnnnnnnnnnnnnnnnnnnnnnnnnnnnnnnnnnnnnnnnnnnnnnnnnnnnnnnnnnnnnnnnnnnnnnnnnnnnnnnnnnnnnnnnnnnnnnnnnnnnnnnnnnnnnnnnnnnnnnnnnnnnnnnnnnnnnnnnnnnnnnnnnnnnnnnnnnnnnnnnnnnnnnnnnnnnnnnnnnnnnnnnnnnnnnnnnnnnnnnnnnnnnnnnnnnnnnnnnnnnnnnnnnnnnnnnnnnnnnnnnnnnnnnnnnnnnnnnnnnnnnnnnnnnnnnnnnnnnnnnnnnnnnnnnnnnnnnnnnnnnnnnnnnnnnnnnnnnnnnnnnnnnnnnnnnnnnnnnnnnnnnnnnnnnnnnnnnnnnnnnnnnnnnnnnnnnnnnnnnnnnnnnnnnnnnnnnnnnnnnnnnnnnnnnnnnnnnnnnnnnnnnnnnnnnnnnnnnnnnnnnnnnnnnnnnnnnnnnnnnnnnnnnnnnnnnnnnnnnnnnnnnnnnnnnnnnnnnnnnnnnnnnnnnnnnnnnnnnnnnnnnnnnnnnnnnnnnnnnnnnnnnnnnnnnnnnnnnnnnnnnnnnnnnnnnnnnnnnnnnnnnnnnnnnnnnnnnnnnnnnnnnnnnnnnnnnnnnnnnnnnnnnnnnnnnnnnnnnnnnnnnnnnnnnnnnnnnnnnnnnnnnnnnnnnnnnnnnnnnnnnnnnnnnnnnnnnnnnnnnnnnnnnnnnnnnnnnnnnnnnnnnnnnnnnnnnnnnnnnnnnnnnnnnnnnnnnnnnnnnnnnnnnnnnnnnnnnnnnnnnnnnnnnnnnnnnnnnnnnnnnnnnnnnnnnnnnnnnnnnnnnnnnnnnnnnnnnnnnnnnnnnnnnnnnnnnnnnnnnnnnnnnnnnnnnnnnnnnnnnnnnnnnnnnnnnnnnnnnnnnnnnnnnnnnnnnnnnnnnnnnnnnnnnnnnnnnnnnnnnnnnnnnnnnnnnnnnnnnnnnnnnnnnnnnnnnnnnnnnnnnnnnnnnnnnnnnnnnnnnnnnnnnnnnnnnnnnnnnnnnnnnnnnnnnnnnnnnnnnnnnnnnnnnnnnnnnnnnnnnnnnnnnnnnnnnnnnnnnnnnnnnnnnnnnnnnnnnnnnnnnnnnnnnnnnnnnnnnnnnnnnnnnnnnnnnnnnnnnnnnnnnnnnnnnnnnnnnnnnnnnnnnnnnnnnnnnnnnnnnnnnnnnnnnnnnnnnnnnnnnnnnnnnnnnnnnnnnnnnnnnnnnnnnnnnnnnnnnnnnnnnnnnnnnnnnnnnnnnnnnnnnnnnnnnnnnnnnnnnnnnnnnnnnnnnnnnnnnnnnnnnnnnnnnnnnnnnnnnnnnnnnnnnnnnnnnnnnnnnnnnnnnnnnnnnnnnnnnnnnnnnnnnnnnnnnnnnnnnnnnnnnnnnnnnnnnnnnnnnnnnnnnnnnnnnnnnnnnnnnnnnnnnnnnnnnnnnnnnnnnnnnnnnnnnnnnnnnnnnnnnnnnnnnnnnnnnnnnnnnnnnnnnnnnnnnnnnnnnnnnnnnnnnnnnnnnnnnnnnnnnnnnnnnnnnnnnnnnnnnnnnnnnnnnnnnnnnnnnnnnnnnnnnnnnnnnnnnnnnnnnnnnnnnnnnnnnnnnnnnnnnnnnnnnnnnnnnnnnnnnnnnnnnnnnnnnnnnnnnnnnnnnnnnnnnnnnnnnnnnnnnnnnnnnnnnnnnnnnnnnnnnnnnnnnnnnnnnnnnnnnnnnnnnnnnnnnnnnnnnnnnnnnnnnnnnnnnnnnnnnnnnnnnnnnnnnnnnnnnnnnnnnnnnnnnnnnnnnnnnnnnnnnnnnnnnnnnnnnnnnnnnnnnnnnnnnnnnnnnnnnnnnnnnnnnnnnnnnnnnnnnnnnnnnnnnnnnnnnnnnnnnnnnnnnnnnnnnnnnnnnnnnnnnnnnnnnnnnnnnnnnnnnnnnnnnnnnnnnnnnnnnnnnnnnnnnnnnnnnnnnnnnnnnnnnnnnnnnnnnnnnnnnnnnnnnnnnnnnnnnnnnnnnnnnnnnnnnnnnnnnnnnnnnnnnnnnnnnnnnnnnnnnnnnnnnnnnnnnnnnnnnnnnnnnnnnnnnnnnnnnnnnnnnnnnnnnnnnnnnnnnnnnnnnnnnnnnnnnnnnnnnnnnnnnnnnnnnnnnnnnnnnnnnnnnnnnnnnnnnnnnnnnnnnnnnnnnnnnnnnnnnnnnnnnnnnnnnnnnnnnnnnnnnnnnnnnnnnnnnnnnnnnnnnnnnnnnnnnnnnnnnnnnnnnnnnnnnnnnnnnnnnnnnnnnnnnnnnnnnnnnnnnnnnnnnnnnnnnnnnnnnnnnnnnnnnnnnnnnnnnnnnnnnnnnnnnnnnnnnnnnnnnnnnnnnnnnnnnnnnnnnnnnnnnnnnnnnnnnnnnnnnnnnnnnnnnnnnnnnnnnnnnnnnnnnnnnnnnnnnnnnnnnnnnnnnnnnnnnnnnnnnnnnnnnnnnnnnnnnnnnnnnnnnnnnnnnnnnnnnnnnnnnnnnnnnnnnnnnnnnnnnnnnnnnnnnnnnnnnnnnnnnnnnnnnnnnnnnnnnnnnnnnnnnnnnnnnnnnnnnnnnnnnnnnnnnnnnnnnnnnnnnnnnnnnnnnnnnnnnnnnnnnnnnnnnnnnnnnnnnnnnnnnnnnnnnnnnnnnnnnnnnnnnnnnnnnnnnnnnnnnnnnnnnnnnnnnnnnnnnnnnnnnnnnnnnnnnnnnnnnnnnnnnnnnnnnnnnnnnnnnnnnnnnnnnnnnnnnnnnnnnnnnnnnnnnnnnnnnnnnnnnnnnnnnnnnnnnnnnnnnnnnnnnnnnnnnnnnnnnnnnnnnnnnnnnnnnnnnnnnnnnnnnnnnnnnnnnnnnnnnnnnnnnnnnnnnnnnnnnnnnnnnnnnnnnnnnnnnnnnnnnnnnnnnnnnnnnnnnnnnnnnnnnnnnnnnnnnnnnnnnnnnnnnnnnnnnnnnnnnnnnnnnnnnnnnnnnnnnnnnnnnnnnnnnnnnnnnnnnnnnnnnnnnnnnnnnnnnnnnnnnnnnnnnnnnnnnnnnnnnnnnnnnnnnnnnnnnnnnnnnnnnnnnnnnnnnnnnnnnnnnnnnnnnnnnnnnnnnnnnnnnnnnnnnnnnnnnnnnnnnnnnnnnnnnnnnnnnnnnnnnnnnnnnnnnnnnnnnnnnnnnnnnnnnnnnnnnnnnnnnnnnnnnnnnnnnnnnnnnnnnnnnnnnnnnnnnnnnnnnnnnnnnnnnnnnnnnnnnnnnnnnnnnnnnnnnnnnnnnnnnnnnnnnnnnnnnnnnnnnnnnnnnnnnnnnnnnnnnnnnnnnnnnnnnnnnnnnnnnnnnnnnnnnnnnnnnnnnnnnnnnnnnnnnnnnnnnnnnnnnnnnnnnnnnnnnnnnnnnnnnnnnnnnnnnnnnnnnnnnnnnnnnnnnnnnnnnnnnnnnnnnnnnnnnnnnnnnnnnnnccttggtgcctgtctgggctccagggcccccacccacccctgcaggcttatgtgcggatcagcaagtaggcactctgctctcggggcaggtactcggctggaggcgaggacacgggagggatttcagccctctcgctccccaggtaagatgtccttgtgcagagaacagcctgcacgacctactagggcacccaggattaggctgtatcctccgtctgcccaaactggctacagaaagctcattttaacgcccactagagagtgaggagactgtaggtgcaatttcttttttcttttttttctgagacagatgagtcttgctctgtggtcccaggctggagtgcagtggtgtgatcttggctcactcaaacctccacctcccaggttcaagccagattctcctgcctcagcctcccgagtagctgagattacaggcatgcgccaccatgcccagctaatttttttatatttttagtagagacgtggtttcaccctgttggccaggctggtctccaactcctgacctcaattgatccacccacctcagcctcccaaagtgctgggattataggcgtgagccactgcacccgccctgtaggcagatttttttttttttttctgagatagtttctctctgtagactaggctggagtgcagtggcatgatctcggctcactgcaacctctgtcttccgggctcaagcaattctcctgcctcagcctcccaagtagctagtattacaggtgtgtgccaccacacccggctcatttttgtatttttagtagacagggtttcaccatgttggccaggttggccttgaactcctgacctcaggtaatccgcccgcctcggcctcccaaagcgctcggattacaggcgtgagccacagcgcccggccatacacgaatttttttgagacagtcttgctctgtcgcccaggctggagtacagtggtgtgatctcagctcactgcaatctctgcgtcctgagctcaagcgatcctcccacctcagctgggattagagtgtgccgccacgcctggctaatttttaaatatatatatatatatatatttttttttttttttttttttttctgagacggagtctcgctctgtcacccaggctggagtgcaatggcgtggtctcggctcactgcaacctccgcctcccgggttcaagcgattctcctgcctcagcctccgaagcagctgggattacaggcaccagccagcatgcccagctaatttttgtatttttagtagagacggggtttcaccatgttggccaggctggtctcgatctgctgacctcatgatccgcccgcctcggcctcccaaagtgctggaattacaggcgtgagccactgcgcccagccaatttttagtttttaatttttgtagaggcggtttttcgccatgttgtccaggtctcaaattcctgggctcaagtgatccgcccacctccgcccctcaaagtgctgagatcacaggcgtgagccacggcactccgccgcaattcctgacttgtactgccccagtggtgttacagcctcgaacccagtttccagacctaagtcaccgccggcatccagagtcccatgatggaaagggaggctaggttcccctgggaaggaccttgcaccactgctgcaagtgcaccccagaaatcgtcccaagcttttctcaaagggacctgcagccatttataaaagcgacatatcatcctggaaaacaggtgcgctcgagcaggatttcctcccgtccttcctgtcaaaggacgggaagactttgttaccccaccgcgccccacctgcagaatggtggacagatacctccagatgccacttcccccaggacgcccgcctgctctgcgcacctctccccggatgctgccccgtgggcgggtgggggcggccctgcttccccacgacccccagacgcacccggagggactcttgagcacagtggagtgggaagggcgaggtggggcggtgcccaggcgagagcggctcatgggaggcggcgcccgagacgcagctggtcgggacggtgcgggtcagggtgggcggacggggctagagatgccccggggtttcccaggccatgagtctccgtggagatttctcctcgacctcttccccgcggcaatgtgcgaaccctgggtctccaggaaacggggatacggggcatggctcccagcaaggcctggtccagcctctccggtaggggaatgggtctccccctccggcctcccgggttgacaaaggaacgcgggcccagatccccgtatggcgcttcaccgccggggcctctagcctagaaggaggcacggagcgcgtgtccgagacccgtgcaagctcagggacactctcgcggtcgccgggaggcccacctagggtactttccttttttccactctcagaaatatacgtctgtcacagttaacggcaaagcctarggcaagagttctacgcccaagatggccagccggaagcgggcttctcgcgaccatgtggcgaagccccattcgtcagctggccgcccgcggcyctggtacccggtcacctctctgatctgcgcatgtgctgggctacgcccgggcgcaaggccaagagcggctgcgtctatggtcatgacgtctgacagagcgtccacccgtcttcgmcaggactctatggttcttacgcgcgcaracagaccgcctatataarccatgcgcaggcggaggagcgcctctttcccttcggtgtggtragtaagcgcagttgtcgtctcttgcggtgccgttgctggttctcacaccttttaggtctgttctcgtcttccgttccgactctctctttttcgttgcagccactgaagatcctggtgtcgccatgggccgccgccccgcccgttggtgagtctwgaatccgtgtactttcactgctgggaaacgggcggggaaagaagtgcctatggccgctgaaaacaattgtggggtggagcctcccccgtgcggcggccctgtcttgggaactgaccctatgttttacacctcccggctattttttagtctgcaatattactgtctgttccttcgttcccgtgtcggtgtggaagcgacggttccctcgtatctctgcctgtgtcctgcaagctcaccgcattttcgggcgctmgatacgctcttggggcctttgtgtgcgttctctgtcttatttccgggcgacgtgccgcgtgcgttgtcggacgtgaagggcagtccgggaaaaacgggtgcggccgcctcctgtgtcctacagggggcgccagacgcatttccactcggctyggaggtggatttagtgccacgtgcccgaaagtcttaaattgggtgacctgagctgtgcaatgataatgcggcgattttgtagtacgcagtgtcttgaagagagaatttttaactaggaaagtttgttgcaaagtgtttataggaagcgtaagacaaagtaacggaagatggtgtctgttgtttctagtcttgggtgttstctgtgttgcagcagccaactgttgctttgtagtttatttccccgaatggaaacggtttagaagtggacgtgcattccccacccttttcccgtccctcgtttgggttgttccttgaggggcaaagtgcctgttgggctttctgtgaacctcacctaacctgtgttttttcactcccctgcagttaccggtattgtaagaacaagccgtacccaaagtctcgcttctgccgaggtgtccctggtaagtagtggaagagcccctgcactggttggctctgcggactccgcgtccgtctgtgacaccccctgcacacttacccaatccttttagatgccaagattcgcatttttgacctggggcggaaaaaggcaaaagtggatgagtttccgctttgtggccacatggtgtcagatgaatatgagcagctgtcctctgaaggtaaggcaggattctttgttcgtcaccccccagtccttcctccgtgctccmtcaaccccacccacatacactgcactggaattgggagttgatgaaacatgagccttacaaaactcagccaacacagttcccctgagctggagatagtcgtggtgaatgtttctctattatcttctctcactttgctgcttttcttctccctacctagccctggaggctgcccgaatttgtgccaataagtacatggtaaaaagttgtggcaaagatggcttccatatccgggtgcggctccaccccttccacgtcatccgcatcaacaagatgttgtcctgtgctggggctgacaggtgagcttggtctgggccttttaaggcagttggagtctctacattattaggcttgcattattttatcagagcatagaggtggccccagtgactcagccactatggctactagaaaagccaggctggcaagtgactttcagtggtcactcaggaccccttcctgcagatacaaacaaagcatgagtaagtcttagcaagctcttccccacaggttaggggaaacactggtgatgggagtagctcttcttgcttttagctgaatgacaaccatcttgccagcaggtagctgaagctggcagaggagcccagtggcgccttttcagtggttcttgggatctccgcagccaattaagccgactgagttcctttcctcatggggacccagtgtgcgatggctgcacacagcagcttccttggtagtgtacgcagcctgttggttgtatgggttgctctaagggaccttggagacaggcctttcaggtggatgttcatgtttctgaccttgcactaccccaatgtaggctccaaacaggcatgcgaggtgcctttggaaagccccagggcactgtggccagggttcacattggccaagttatcatgtccatccgcaccaagctgcagaacaaggagcatgtgattgaggccctgcgcagggccaagttcaagtttcctggccgccagaaggtatgtagtgctgcagcccccttctcccacctttgccccaggcctcctgactsagttctttccattgctccttagatccacatctcaaagaagtggggcttcaccaagttcaatgctgatgaatttgaagacatggtggctgaaaagcggctcatcccagatggctgtggggtcaagtacatccccartcgtggccctctggacaagtggcgggccctgcactcatgagggcttccaatgtgctgcccccctcttaatactcaccaataaattctacttcctgtccacctatgtctttgtatctacattcttgacggggaaggaacttcctctgggaacctttgggtcattgccctttcacttcagaaacaggttgacaactcagccctgctcatgaggcagcaaaccctgcaaagggctgggactggtggccttatgtcagttgtctactctggagcttgacttggacctccccaggtcctaggcagtaggttgaaaaacactgaagtgcttttcatgaagcacagctgcagcaaagccttgcaatcccaggctggggtcagcctacagttgtgttgcttattacaacacatgcggaccaagaggggcttgtgggctagaggctgaccagcagcgtttatttagcaagggtaggtgtgcatcacattgggcttgttctcacccatctggtttggycattcctccttggtgggaatcatccaggtactgctgaggtcacctgcgatttgccccatttcctatctctagcaacctcctgggccccatgcccccaccccttctagaacctgcattcccagggccttcaccacctgaccaaaggtctaggctaacctttggtcatttgtaacaagacctcggaacagacacgtgtgtggcatggtttggcctggggatcttagatgtctgacctgaactattgtagaacagcgctggcttttgggggagcagcaaaaatgagaggagtgctaggtgggtggcctgagcatctgtatccagggacaggactccaaaggcttttggtcccagagctggggtatgttggccccagcccccagcctgtggctcccaaaaggcctctggttttttgtaatctcagtttacagccatttcttaggtttttaattacctttattttattttgccaaacatacctgggaataccttttattttttttttaccttggggtgatggttccaaaccataaatgtgattatagttaacacatgacccttctagcgtcccagccagtgtttttcctgacctctsttctttggagaggaggatggaagggaggggtccggcaygctgctggcattttgctgtgtcctgcagcccctttccgggacacctgggttcacacagctttttagcttacataactggtgcagattttctgtgtggagatgttgccttgaccagccttggctggacctttaccaggcatgcagaagcctgtaccaacacagactacagcacccaggaggtgcgagtgtggctgctcagcggttataacaggcctgactgcattgttcaccggattataatgagccaaaatgtttcccggtgtttgctggtttcrgggaaggagtttgatatagcagattaaccaccctccttgtagctattggggcttaatggtttcctggtgattcttaccaatccacaataaacatggcccattggcatatctgctgcacaagtgtcctatctcaccaatctgggtttttgttctcagtaactttccttcttgtcatacaacatcttcattcctctttctgaaccctcccttcccctaccccaacccagagcccactttgtctccactcctgatactacactacctggcaggtggcatgagtgcagggcccctggcttcctctcctaatctaggcacaagcccaaccaaagaacaagagccaaatcaaacaaggcaggcaggggtggactacagtcacagggcaactatagttgaagccccccagccccagggctggatggacgggggaggctggggtttaagtcccaaaaggcagcaggccctgggggggtagggggacgctcaggcagcagggcacagctgaggggacaggagtgatagcagcaacagaacagtgaggctgagaggctggacgctgtgcgcctggctcagcttcagctccacctccacggggtagtggtcactgatgttgagggcctgggaatgggtggtggggcagtgtcagtgcccggggccgaggggcttccctgtgaccctgctgctgccctccctcctcatgccagccccatcccttcacctcctcctcggtgagctggaagctcgtggggaagtcaaaggcagccgcagtgtgcagcagactccggcagcgctccccgtgcagcacgacgcggtcataggtgcagtgggtgctggcccgcactgtggtgtcctccccatcggcaatcacccagtggaagcctggctcagtccgcagctccagcttgtccaggcgctttttggtcagtgaagcgcagtcagcattgaagtccccaagcaggatcacgtcctagagacacagcagccatcaggctggccgctgggccaccctatccttgtccctcctgtacaaactgcccaggcctaccttgctctgccagtgctgggagacctccagaaacacatcgtagagggcgttcagctccttctctacggccttaggagtggtgtgcagcgggaccaacaccaggctgggaaggactgcaaggcccagggaccgagggctgccatccactcctggaccttctccccctagcccgtctgggtgaggaagcccccagtggagccagccagaactccccttctgctcccacataccaagcccacccttcccttcctaccattgctgggcaaagagaactgggccacaaatggctcccgggcaaagacgtcatcctcatcgttgtacacgtaggaactcaggacctgtgttttgtgtgacctgggaggacaaagggatgggcagcagtggccccacgtctttgattttggcttgcaagtgccaaacggcgctcagggaggggccctccactaacagcggcaatgtgggcacagccctcccaacctgtctctagaactttcaaaaatcaggcataattcatatgccataaaattcacctgcttcaagtatacaacacggttcttttgtacattcataaggctgtgcaactatttctacaatcaattttaaaacattggtatccattactcctaataaaaacataacatccattaccagttactctccattctcccctccccccagcccctgcaaccattaatctgttctctatcttgtacatttgcctattctggatatttcatatgaatgaaatcagctcatcaatgttttctgcgttcgtccatatgctgtggcacgtctgtgcttcattcctctttctggctgaataatattccacggactgggtatagtacattttgacatttggacactttgatgtcattctttttttttttttttttttttttgagacatggtctcactctgttgctcaggctgcagtgcactggcacaatcatagctcactgcagccttgaactcttgggttcaagtgatcctgctgcttcagcctcccaaagcgttgggattacaggcatgagccactgtaccctgcctacccagtaattttggagcgcataccagatgtcatatcattttatttatatagagaatcagttctccttccctgcagcctcccttgccctctggatcctgactccaaagggctccctgccagcctgtcctcccagggacttagaagatcgggtctacccaaggcccataagtggtccccacggagcctcttcccaggagctgcagcccttgctggccactttcatagagggggccagccacaccctgagccccagcagctcccacaggagagaggaggagggaccccacatttgtgcttatagaaggaaggcctcctgctctatggacactctggcgggggtcgaggatgggaagagcccagaataaaaggtgttgagaagagaaagcatgcaaagcaggtgaggctgtcccaggatggggggcctgtggccccggggactaatgagcctacctcacattagggccaaggaccgccccccaccctgctgcgctgccagctccgtgctcaccgatagaagtacacatacgtctccatgtaggtgctgcgccccagctgggggctgctcagggtgctgtagggcccagagccatcaaatctgccaagaaaaggggaggcggggtcagggcctcaagcctctgggtgtgcccctgattagacccacagaatcttcctcaccgattgagttctcgaagcaggagcgggatggcgctgccggaagagtccaccacctcctgcagcaccatgatgtcacagcgagccagtatctgtgggacatcaggaaggccagcctgactcagtgccaactgccctgagaggaggcagtgggcccaggggactggcactgttgtggcccagagtgttaaggctcactgactgcagcccacagaaagcagtgggactggaaatgccccaggaaaagactcatcccacccacatgtcacctgtttcacagaggaggagactgaggccagcagcaggcaagcgcctgcgctgcatctccgtgccacacctcttcttctcccctcttctctagaacatacccctggtcaggcagggatgggggctttggctcatggtggttaggggcacggcttccctgaagtgatgaacttacccgaactaaggtgtccatcacctgctccctggccaccttggccagtgtcagccgctgggcattgaaggcgcagatgcgaaaggcctgggccccattggccaggatgaggaagaggagtgcagttgggtagtgcatggctgtgtgtggctgccggggacaccccaggaatccaggctgccccagggtgcgctctcactgggctcagttctggctctggaggcgctgaaatatgggacagaggaagtggcactagctgctgcccagcaccagcctcccagtgacctcccgagatcataccactgcactccagcctgggtgacagagtgagactctgtctccaaaaaaaaaaattgtttttgagacagagtcttgctctgtgaagatcaagccaagatcgcaccactgcactccagcctgggcgacaataagactccgtctcaaaaaaaagtgaaatcctacagtatttgtctttttgtgactggctcatttcactgagcaaaatgtcctcaagggtcattcatgttggagcatatgtcagaattttttttttttttttgagacggagtctcactctgtcgcccaggctgagtgcagtggcgcaaacgcggctcactgcaactccgcctcctgggttcacgccattctcctgcctcagcctcccgagtagctgggactacaggtgcctgccacacgcccggctaattttttgtatttttagtagagatggggtttcaccatgttagccagaatggtcttgatctcctgacctcgtgatctgcccgcctcggcctcccaaaatgctgggattacaggcgtgagccaccgcacccggctgtagaatttctttccttttcatggctgaatcatattccattgtctgggcatctgggtagaccacattttgttcattcattcattcatccatccatctggttttttttttttttttttgagacggagtttcgctcttgctgcccgggctggagtgcaatggtgcgatctcggcttactgcaacctctgcctcccaggttcaagcgattctcctgcctcagcctcccaaatagctgggactacaggcacgctccaccacgcccagctaattttgtatttttagtagagatggggtttcttcatgttggtcaggctggtctcgaactcctgacctcaggtgaactgcccaccttggcctcccaaagtgctgggattacaggtgtgagccaccgtgtccttttttttttttttttttttttttaaatagagacaaggtctcactatgttgcccaggctggtcttgaactcctgggctcaagcaattctcctgcctcagcctgctaaagtgctgggattgcaggaatgagccctggtgccccagcctcatgcatctcttgacctcgtgatctgcccgcctcggcctctcaaagtgctgggattacaggcgtgagccagagcgcccagcccctgctttcagttcttttgggtatatacccagaagtggaattgctggatcatatggtagttctagttttaattttctgaggaagtgtcatattggtctccatggtgactgcaccattttacgttctcgccaacagtgcacaagcggtcaagcttattcttttattgtttatttatttgggacaaagtcttgctctgtcgcccagactggagtgcaatggtgccatcacagctcactgcagcctcctgaattctatgtttcccaggctggtctcaaactgctggactcaagtgatcttcctacctcagcctcccaaagtgctgggatttttttttttttttttttttttttttttttttttttgagacagagtctcactctgtcgcccagactggagagcagtggcgtgatctcggcttactgcaacctcagcctcctgggttcaagcaactccctgcctcagcctcccgagtagctgggattacaggcacccaccaccacgcccagctaatttttatattttttagtagagacagggtttcaccatcttggccaggatggtctcgaactcctgacttcaggtgatcagccggccttggcctcccaaagtgctgggattacaggtgtgagccactgcgcccagccagtgctgggatattataggcctgacccactgcgcctggcctagtctacctttttttttttttttttttttttttttgagatggagtcttgctctgtcaccaggctggagtgcagtggcgtgatcttggctcactgcaacctctgccttccgggttcaagtgattctcctgcctcagcctcctgagtagttggggctacaggcgtgagccaccgcgcccggcccccccccttttttttttttttttttttgatagtctcattctgttgctcaggctggagggcagtaatgtgatctcagctcactgcaacctccaccttccaggctcaagtgatgctctcacctcagccttccgagtagatgggactacaaggtgcatgctgccacaccaagctaattttttttttctttttttgagatggagtctcactctgtctcccaggctggagtgcagtggcttgatctcagttcactgcaacctccgtctcccaggctcaagagattatcctgcctcagcctcccaagtagctaggattacaggcacgtgccaccacacccggctaatttttgtacttttagtagagacagggtttcaccatgttggccaggctggtctcaaactcctgacctcaagtaatcctcccacctcagcctcccaaagtgctggaattacaggtgtgagccaccgcgcccggctaccaagctaatttttaaaatttgtttggagagatggggtttcaccatgttgttccaagaccccagtgcttttcgcctccattagcaactacaggaacatcttcgttca

SEQ ID NO: 94556 - DNA, 19879 bp, Homo sapiens
accaacatggagaaaccccgtctctactgaaaatacaaaattagcagggcatggtagcgcatgcctgtaatcccagctacttgggaaggctgaggcagaagaatcgcttgaacctgggaggcggaggttgcggtgagccgagatcgagccattgcactccagcctgggaaacagcagcgaaactccgtctcaaaaaaagaaaaaaaaaaggctgggcctggtggctcacacctgtaatccaagcactttgggaggccgaggcaggcagatcacgaggtcaggagatcgagaccatcctggctaacatggtgaaaccccgtctctactaaaaatacaaaaaaattagccaggcgtggtggcgggtgcctgtagtcccagctactctggaggctgaggcaggagaatggcgtgaacccgggaggcggagcttgcagtgagccaagatcacaccactgcactccagcctggtcgacagagtgagactccgtctcaaaaacaaacaaaaaacccccaaaaaattagctggcgtgatggcgcacgcctgtaatcccagctactcaggaggctgaggcaggagaatcacttgaacccaagaggcagaggttgcaatgagctgagatcgtgccactggactccagcctgggcgatagagggagacttcatctcaaaaaacaaacaaacaaataaacaaacaaaaaaacacaccaggcacagtggctcatgcctgtaatccagcactttgggaggccgaggcaggcagatcacaaggtcaggagatcgagaccatcctggctaacatggtgaaaccccatctctactaaaaatacaaaaaaaaaaaaaaaaaaaattagccaggcgtggtggcaggtgcctgtagtcccagctggaggctgaggcaggataatggcgtaaacccaggaggtggagcttacagtgagccgagatcgtgccactgcactccagcctgggcaacagagcgagactccgtctcaaaaaaaaaaaaaaattaaaaataaaagaaagaaaaaggaatattttgatacatgctatcaaatggatactctcaaaggattttcaagaaacattatgttaactgcaataagccggaaacaaaaggctgcatattatatgattccacttatatgatgtacttaccggcttcagatccagagtcaaaaagtagaaggttggtttccagggcctgggaggatgggggaatgagaaattgtataatggggacagagctttagtttgggaagatgaaaagagttctgaagatggatggtggtgatgactgtacaacagtgtgaacgtacttaatgccactgaactgtacagttaaaagtggttaaggccgggcgtggtggctcacacctgtaatcccagcactttgggaggccgaggtgagcggatcacctgaggccaggagtttgagaccagcctggacaacatggtgaaacccccatctctacaaaaaaaaaaaaaaaaattagctgggcatgttggtgggtgcctgtaatcccagctactcaggaggctgaggcgggagaatcactgaaacccgggaagcagaggcttcagtgagccaagattgtgccattgcactccagcctggacaacaagagcgaaattccgtctcaaaaaaaaaaaaaaaaaaggcatttcacagaagaggaaacacaaaaggcagagtgtgcatggtatgggtttcctgtggctgcagtaacaaagtgccagagactgggaagtttaaagcaacagaaatttattctctcccagttctgaaggccagaagtccgaaatcaaggtggcaccagggtgggttccttctggggctgtgagggaaagccagctccaggcctgtcttctggcttcttccggtggttcccagcaatgctccgtgttccttggcttgcagaggtgtcattccaatctctgccttcagctgcgtgcagtgctctcctccctgtgtctgtctctttttctcctcctttaaaaacaccatgcattgattgaactaggggtcacccttatgcagtataacctcaccttaacttgattctgtctgcaatgacttttatggggacactactcaacccagtgcatatactctatgacctagcaattccccacctagttatatacctattgaaatgaacatctatgtttaacaaaagacacatacatcggctgggcgcagtggctcacgcccataatccaagcactcaggccgaggcgggcagatcttgaggtcaggagatagagaccatcctggctaacacagtgaaaccccgtctctactaaaaatacaaaaaattagctgggcatgggggtgggcacctgtagtcccagctactcagggggctgaggcaggagactggcgtgaacccggaaggcggagcttgcagtgagctgagatcacgccactgcactccagcctaggtgacagagcgagactccgtctcaaaaaaaaaaaaaaaaagaagaaaaagaaagacgtatacataattgttcacagcagcattagccataacagcccaaatgggaaaccaaccaaatgtcaacagttgaaggacacaatcaatggtgacgtattcatccaggggaatactatgcagcaacattgttacatgcagccacttgaattaatctgccaatgttgagcaaagaatctagacacaaaataatacttcccttcagagtggaggagaaggctgagtgcggtgactcacacctgtaatctcagcactttgggaggccaaggtgggtgggtcacctgaggttaggagttcaagaccagcctgaccaacatggtgaaatcccgtctctactaaatacaaaaaattagccgggcgtggtggcacatgcctgtaatcccagctactcgggaggctgaggcaggagaattgcttgaatccgaaggttgcagtgacccgagatggcgctattgcactccagcctgggcaacaagagccaaactctgtctccaaaaaaaaaaaaaaaaaaaagagtggaggagggaaaaatattatactgaataatttcctttatttaaagcctcaaaacagccaaaacaacacatcccatcatttttaggaatgcatgcttaactggtcaaactataaagaccaaagtgattagcaaaagaatcaagttcatggtcacattgggaagtgatagtaagggtatgagaggggctttcagggcaatgatattcaaattcttgacctgggtgatgccatggaactgtctgctttgataagcattacactgtacatctttattttgtgggtttttttttttttttttttttttgagacagagtttcgctctgtcacccaggctggatggagtacaatggcatgatctctggtcactgcaacctctgcctcctgggttcaagcgattctcctgcctcagcctcccgagtagctgggattacaggcgcatgccaccatgcccggctaattatcttgtatttttaatagagacggggtttcaccatgttggccaggctggtctcgaactcctgccctcaggtgatccgcccgccttggcctcccaaagtgctgggattacaggcgtgagcaatgcgcctggcctacttcttttcttttttgggttacgtttcaccatagaagtgctttttttttttttttttgagacagagtcttgctctgtcgcccaggctggagtgcagtggcacgatctcggctcactgcaagccccatctcccgggttcacgccattctcctgcctcagcctcccgagtagctgggactacaggcgcccgccaccacgcctggctaatttttcatatttttagtagagatggggtttcaccgtgttagccaggatggtcttgatctcctgacctcgtgatccgcccgcctcggcctcccaaagtgctgggattacaggcatgagccaaagtgcccggccctttttttttttcttttttttgagatggagtttcgctcttgttgctcaggctggagtgcaatggcacgatctcggctcactgcaacctccgcctcccaggttcaagcaattgtcctgtctcagcctcctgagtagctgggactacaggtgcccgccaccacgcccagctaatttttgtatttttagtagagacggggttttgccatgtttgctaggctggtctcaaactcttgacctcaggttatctgcccgcctcagcctcccagtgttgggattacaggcgtgagccaccacgcccagccaggatttcaatgaacaaaatgcttttaccctaaagatgaagtccccagacagaaggtgctcattggtgctgtcaacatttggtgattggttcagtttagatatcacctcctggtgggagcagcttcatcggtgcccctctccttacatccctcccagtcccatgtctcaacctttggaatattcatgaccctgtatcatgacctgctgtcctgcatgtcctctagaccaaactgtcaacttccggggcagagtccaggtgcctggcccatagcaggtgcttcaggaagcctccagggccatcactccagggacccctagcaatgcagggaagaataaaagcagccacaggtgggtttcttccctaagcatggaagcagctcagcaacagagtcctggcggaggcaagattgccttccgcattccagaggaagtatttgccttgaaactatgtaacaaaagtaacagaaacataatagacatgctttcctttttaagtttgctggattctcctgggatacagtgaagctccagtgaaaacctctctcctcagctagttaaggcctggaaatggccacttgggggtttccctaagcacccgaaactcagtgagcccccaagtgacctcgtctcccagtccccaactcagagagacccaaaagctacaatcttctttgactgtattgtcagacccacttcctctctccagctcaactgccactatcctagtcctagtctgaatcacatgtgacaatcatgactacaatctttttttttttttttttttgagatggactctcactctgtcgcccaggatggagtgcagtggcgcgatctcggcccactgcaacctccgcctcgcgggttcaagtgattctcctgcctcagcctcccgtgtaactgggactacaggtgtgcaccaccatgcccagctaatttttgtattttcagtagagatggggtttcaccatgttgtgcaggatggtctcgatctcttgacctcatgattcgcccgcctcgggctcccaaagtgctgggattacaggcgtgagccacagcgcccggcccgttagggtgtctttgatgccacgcttcgctctgggttttctccttcctctttgattgctccttgtccgatctcttttctggacccttctcctcctgcccaatgtaagtgctgggtgttcccctagatgctatcctgagcccgcttcactcctcgttctaagggattacagtctcctctcacctgtatcagggagggtccatctgcaggaaaaagacaccacttttgcaattttaaggaaaaggattaaaacagggattggccgggtgcggcgatgcgcgcctgtagtcccacttttccggaggctgaggcgggaggatcgcttgagcccggggactcgagaccagcctggccaacatagctagaccccgtctctaaagaaaaaaaaaagacaaaagaagagaacaacaacaaaaaaaccaaaataaaaataaaaataaaaacggacgggcgaacgcgtcgggtgggcgtagggttccgcgaagcctccctgtccctcttgtctcgtcctagtcggtctagctgggccccatcccctttcccactcggagcgkgagcgcctrgagacacgtacagccaaccagtgagaaggagtggccgcgagtggcatgcamttggtccaattacctgcggccctgccggtcggcccgcgctggggccaatggaggtgcgaggcggggctcgggcgggggcaacggtcacctgatctgcggctgtcgaggccgctgaggcagtggaggctgaggctatgatggcggccatggcgacggctcgagtgcggatggggccgcgrtgcgcccaggcgctctggcgcatgccgtggctgccggtgtttttgtcgttggcggcggcggcggcggcggcagcggcggagcagcaggtcccgctggtgctgtggtcgagtgaccggtgagcgggccggggtgggatgcgctgtggcggctgaggcgccctcgcccgactccggcgctgtcctaggcgaggggtggtgaggcccggaggtggactgttccttgctcgggggctcgcagcgaatctgccggcgacagagctccagtccacatgcgcccccgtctgacagcacctcttctgtgccctgccagggacttgtgggctcctgcggccgacactcatgaaggccacatcaccagcgacttgcagctctctacctacttagatcccgccctggagctgggtcccaggaatgtgctgctgttcctgcaggacaaggtgcgcccgccccagcccactctcccccggtcatcgggaggcagccaggccccctccccccatgacactgacgcccattccccaagggaagcttcagtgaccttgtcccaactgtagggaggtgtgggtcgtctcatgggaaggcctgtagtaaacgcttcagtgggcatggcgacagcctcggaaatggcaccaacttgattggaggaagcgacggaccagaggccaggtacctactgagtaccaagcactttggatatctgacttagtccaatatggtgggtggggattatcgtccctgtttgtttatagatgagaagactgaggctggaggttaagtgacttgtccaagctcatacagctaatgggtggcagagttgtaattctagctgtgatgatcataataatgataattggaaaatgctcacctgtttagtgctttgtaggcacttgctacactgatgtcattatcttggtttcactgccaaggaaagtaaggtttgtcgagatacaatgtttcactacagttgatagataccactttggttccagcctgagtctgccaatcctccctcccaattggagctcataacccgcatgctgttttccttcccatccaggatctttgccccaaaagcaggcgtggagaccatgagatgactctaagatagcaagtctctgctaggccctcccttgttggtggcctgtatggctcattgcccttgtagtctcccttggttgctgtgtgggcagatggtggtggcctgaagtcttttcaggaggtggtaaataatatagtcaaataggaactgagtcctagttctaccatgtaaccagccattggaggcatgaaataatctttgtgaatgacagtttctacatctgtaaaatgaagacaccacctatatcagagggctgtgagtgggaaatcttttttttttttttttttgagacggagtctcgctctgttgcccaggctggaatgcagtggtgcaatgtcagctcagctcactgcaccctccgcctcccgggttcaagcagttctctgcctcagcctcccgagtagctaggattacagggcgcccgccactacacccagctaatttttgtatttttttgtatttttagtagagatggggtttcaccatgttggccaggctggtcttgaactcctgacctcgtgatccacccacctcagcctcccaaactgctgggattacaggcgtgagccaccgcgcccggcctgtgagggggaattcttataatccacataaaacatctagccaggatcccccagtcttagggcattcacccattcattcatttgcccaatatggaaagcctactatgtgccaggtattgtgaagtgttggggatatggcagtgagcagaagaacccaagcccccaccctcaggaagctgacattcttgtgagggtggccagtaaatactaagtcggtataggatatgatgtcagtgttacggcctttagggaaggaagcaggctaaggggacagagtgactgggatgctattttagataagggtggtcaggccaggcctcattgaggaggtgatatatgagcagcgatcttaatggagggagggagccgtttggggaaggacattcctggaacagcaaatkcgagggtcctgggcgaggtgtgctcttggccagctcaaggaagagctggtgtggctggagcacagtgagtgagagaaaggggtaggagatgtaggagatggtttgcaggtggctaggcgatgaagtaggaccttgtaggccatgagggggaaggtcagttgcagttcgaaatgtgtgagaaagccttgggtaacgtggagcagggagtggtgtgatttctcaattaaagaaagcccacaggacccaccagcagttcctgggctttccgactgagaaccccggtggccaaacagcagcaaggtcctgcccacaagggaggggaggctgggcgagtgtgtataccaaacaggttagggaagctgattaaaatctcctcagggcctaactgggaagggccagaggaagctggggatgggagtggagggtaggagcaaaaggacaaaggacatctgtaggttgtggagaaaaagggatggggtcggggccactgtggtcctaagagctcaaaagacttcaatgctcgatgcttcctccagcatgttctgagatcctcacctctccccttccgccaaaagcaggtggggggagggtcccgtccagactggacatagccgactctccttttctctggctgggaggcctgccacaaatgctcttggctgccccaccccctccccgcagcttccctgttccctccccagttcctcttgtctgtagggtgggcaaggcggctgactcctactcctgagttaccacaagtcagctgcctgcagatctccccaccccatgactgccttccatgtcttctcaccctgccctgagagtgctggagggaagaggtgagtctcccaccccacccccaccaacacacagttgygctccaccatactgaacctgactctcagygagactttgctggccctgagaatgcacggggaaggtggctgtcccctgccttggcccccatcacttgccaaacctcctcagatgtctcccctatttccctaatagctgagcattgaggatttcacagcatatggcggtgtgtttggaaacaagcaggacagcgccttttctaacctagaggtgagagtcctctcccagccaggggccatgggggacattctgtgctccttctcccagcataagaactgtactctgacctcatatcagggttacttgggtctgagtctcttctgggtcaaccatcccccccaaaaacaacaacaacaacaaaagccacctcatactcttagggagcagagacgctggctttggggtagaaaggcctggggcctgaatgtcaggggctggggtgtgggccattttcttggtgagcctttatgggtatggcttgccagaggagagctgccagagaggtgtggggggctgggccaggcccactggcccctggctaactcaccttttgcctctcccctgtccccagaatgccctggacctggccccctcctcactggtgcttcctgccgtcgactggtatgcagtcagcactctgaccacttacctgcaggagaagctcggggccagccccttgcatgtggacctggccaccctgcgggagctgaagctcaatgccagcctccctgctctgctgctcattcgcctgccctacacagccaggtactgcccgcatggcccagccaccagcctcggggcccagagagcagcaaggccctgggctatggcatgtggtggcaccgtttggctaaagatgccagtactccccaccccctcacagcccttccagaaggtgccctgtgtggccagaagaggaggggagggcctcttctgtgactcaggagttggtgcctagcactgagctgggcctccagagatgaggcagatgtgagccctgcgggtggggagccttctcacctagccaggcccttgtcacagagcaggtggccaggacttgagtgtgactgagaagcctcggggtgggatgggcttccaggagggggcactgaggtaagagtgtgcaggcttggtgcgtggggctagtggggaggagaagctggggtcggggaagggtagtgggcagtgcaggtccaggccgcctgaggactctggcgctctgtttgtcttccatagctctggtctgatggcacccagggaagtcctcacaggcaacggtgagtagaatcagggaggatgcacgtcctcatctagcccttgggtgggggccacagagagagctggcctgcagttcctcggcctcctcactcccagggtggcccgcctgcttctcggggcagctggcagtggagcagggaaatgctggctcccaggaccagccagggaccacctgacagaagaccctgtccagccagaccccacttggcagaggggggcggctctctgtgctggaggctgtggagccagtttctgtgcaggcagcgtgaatcctagagttatgggtttaataagactgcagacatttggaaaaacaattctggggactcatctatttgcaataaaggacagtcactccccatggaaaggcagtcgtgaacctttcatgggtggatgtggagttttctgtattgatatgtattttcttatgtcacataggtagggcttggcattagggaatcgatgactgaagccacagttgtctctgggggaggctgggaatgggggtgggatgagaartagctgctcctaaggatcctcagtggaaagtaaacacaccactttcagatggtctagaaggtttctaaagcagacagtggggagtgtttctttatgcagggtgcctggtgacctgagtctctgctctccttgttgaccctcagatgaggtcatcgggcaggtcctgagcacactcaagtccgaagatgtcccatacacagcggccctcacagcggtccgcccttccagggtatgtgcccttccagcaggggctctggggcgtgcagggagaggcagtgtggtgagtctgcttggaggtggggagtgtatgccacaggtaggctgcccaggaggcccagcataggggaagcatgaggcacagaacccctgtggtgtgactatttggagtggctgactctgggggcagggctaggatgagcactcaagtcctgcctccccattccaggggcagctttccatctcgtcctgtgaggcttgtgggtggcagacttggacactaagtctaaatgaccctaagtttgagggactaggaatgtcatcagggtttagggggcatcagggaaggcttcctggaggaaaggtctcctctggctgatgggactttgagatagtggacagggtgtcctgttgggaggggaaggagggcacgacaattgggttcaagtgtgacactctcccagggctgctgaaagaaggctggttgggtgtttctgcaggtggcccgtgatgtagccgtggtggccggagggctaggtcgccagctgctacaaaaacagccagtatcacctgtgatccatcctcctgtgagttacaatgacaccgctccccggatcctgttctgggcccaaaacttctctgtggcgtacaaggaccagtgggaggacctgactcccctcacctttggggtgcaggaactcaacctgactggctccttctggaatgactcctttgccaggcaagggcactaggctggggaggactgtgccaccacaggtgaccttcccatcactgtgggtcgcaggtggggcagggagccagggtcaggtctgtgttttggggtggggatggccatggtctggttggggtctgggcagcgtgaggatgtaggaggtgtcatggcatggggtgctgttggagggggagttgctcagacttctgcctccccatgcttgcgagtctttggttgggaccttggttgttaacacctcaaggttacctgggaacctgtcacctcccccttgagcaaaacctctgggactttgtgtgggcaaataccaggccagctayctgagccatttatggggcaaccatgcccttctgtttgctctcgcccccaaagcccagcccaggcaccttagtgaccctaagagggagtaaaaggaggggcagtgagctcaggggaaccagaggaaggacccccatgctggtggcaagggggacctgggtcctggcttccagctctgttccgaccttgcaatgtgactggatcctcagttttcctatctgtcaagtggggacactgcttcttcaggtgrctgcaaggacccaaggcagctywggtaggagcagagctgaggaacttgttcctctaagatgccaaaggccctcccagagcctcacrgtgcgcctctttctctggccccacaggctctcactgacctatgaacgactctttggtaccacagtgacattcaagtgagtcctgggggtggttgaggtatgggtgggctggtgtggccccagcctccccagctcacctgacatccctgccaccttccccaggttcattctggccaaccgcctctacccagtgtctgcccggcactggtttaccatggagcgcctcgaagtccacagcaatggctccgtcgcctacttcaatgcttcccaggtcacagggcccagcatctactccttccactgcgagtatgtcagcagcctgagcaagaagggtagtctcctcgtggcccgcacgcagccctctccctggcagatgatgcttcaggacttccaggtatggagcgggcgtggcccagcttcaggtgggggagcccaggctagtggttgagagacgaagagaggcttgggcttgggcatgtagttgagagtcctgtccctgcgctgcccctgtcccagttcttgctgggcctcccaacggtcctttctgacccgtgtctgtgtgtctgccagatccaggctttcaacgtaatgggggagcagttctcctacgccagcgactgtgccagcttcttctcccccggcatctggatggggctgctcacctccctgttcatgctcttcatcttcacctatggcctgcacatgatcctcagcctcaagaccatggatcgctttgatgaccacaagggccccactatttctttgacccagattgtgtgaccctgtgccagtgggggggttgagggtgggacggtgtccgtgttgttgmtttcccaccctgcagcgcactggactgaagagcttccctcttcctrctgcagcatgaactgcaagctcccctcagcccatcttgctccctcttcagcccgctgaggagctttcttgggctgcccccatctctcccaacaaggtgtacatattctgcgtagatgctagaccaaccagcttcccagggttcgtcgctgtgaggcgtaagggacrtgaattctagggtctcctttctccttatttattcttgtggctacatcatccctggctgtggatagtgcttttgtgtagcaaatgctccctccttaaggttatagggctccctgagtttgggagtgtggaagtactacttaactgtmtgtcctgcttggctgtcgttatcgttttctggtgatgttgtgctaacaataagmagtacacgggtttatttctgtggcctgagwaggaagggacctccacgacaggtgggctgggtgcgatcgccggctgtttgrcatgttcccmccgggagtgccgggcaggagcatggggtgcttggttgtttccttcctaataaaataaacgcgggtcgccatgcgttgggcctcttgtcgctcatttctgcgctgggctttaggcgcgtgctcgccggagggatgcgggaggatggagcctggcgagggggaggcgaagaggcatccgcggagaccgggaggggctttagcaagctgggccctaaccgctcagggtagggaggggcggtcgggccgagtcccggtgcgcttcggcgtctcaggaggccgtcgtgacaatggcagccttcgcgtcgtgagggggccgccccaggctgccgcagcggcgcgcgcccggccgcggggccgcgccgagactcccgggggggtgggcgggggtggggaggtgggcgggcgcgcgcggggcggggcggggcggggcgcggcgggtggggcggggcgcgcgcggctcccgcgacggattcttcctgggccgcagcaccggccgccggcccgccccgcccgccccgccccgcgcctctctagactctcggcgagcagcgtcgcccgcggagccgcgctggtgctgtggcccgggccctggcagccctcccgggaggcgagccggggaggcggtggcccctgccggttgcggcggggcgcgggaagaggcgggactctttgacgcggcggaggggtcgggcgacggccgacgcgccgccatctttggtccagtgcggtggcggcggcggcggtggcggcggcgactgctgcggtgaaggaggaggaggagccgagcgggcgctggcaccgaggcctgaccatggacgaggaatacgatgtgatcgtgctggggaccggtctcaccgtaagtgcggccccggcgcccctggccctgcgtcgtgccctcgccatcccccgcgatgatgcggccgccggcccatcctctggtcactgccatcttctgcgctccgctccccgaaaagccggcgccgtgcccaccccgctgctcccccagcgacgtcgcctctgctcgttgccatgaccccatctccccgaagaggcccccttcctggccgcctcctgggctacccgggtccgacccccggcgccctcccatcttccctacccctgcccgctggaccggaaaacgcacccccactcggcccgatgcccacgaccccgcccacccatcgcccccacccatcacggcatccacccgtcgcccgcacccattgcccgcctagcgttgcctctcagcgtcccttcccatcttgcgctaatcccggtggggatgaagtagaaggacctggggtcagggggcctcgccagagtgggccctcagcccgcctcctcatcgtcttctggggccaggggatccagggaatgttccagaaggaacagcagtgggggcagtaagcacattcccgcaaccccacctcggttgcccatggagacctcaggctgggtagcatctgcagcctttgtccttgggctagtgacagtgactggtgagggtgtttatcttccccctttccccgaaaaccccgttggcctactcccctcagagactcttcttcctcggtccaggcccagatgcccctcctcagcggcaggggctcctgctatttgaagaaagagcagtccagggtggggcctacaatttcaaggactgtgctaagcctttcttttcctccctttcgagtgtcctttgcagtccagctgggtcttctctgtgccttattgtgttttatccgcctttttgtgcggctctgcgtaggtagatgcctctcggcgtgttggtactggaaggccatcctgtgtctgctggatgccctgcctccctcaaagcctccgttatttcactctccgccttgtgagggggacgggactcctttgcccagcaaggttgcaatggagagtgtggtcggatgaagccatcaccccaattttaggcgaggcaactagccagtggggatggtgggtggaaggagctgtccactgaggcaggtttgggtggggaacaaatcaggtctgctggtaggagcggaggcaggtgggagtgcagcggatggtgtcaccctcccccaggaatgcatcctgtcgggcatcatgtctgtgaacgggaagaaggtgctgcacatggaccggaacccctactacgggggcgagagctcctccatcacacccctggaggaggtgaggctgcccaggcccaagcctatccctgttaacctcccacatagcggcacagggtggaagtagctccccaggtgcctggagcaggaggaggtggtccctgaggtgtctctctctctcccttctgcttacagctgtataagcgttttcagttgctggaggggccccctgagtcgatgggccgaggcygagactggaaygttgacctgattcccaaattcctcatggctaacggtgagggacaggaaggaggtattgcaggtcgggggtgatagggaagacccgaggacggtcaggctccagaggaggcacggccagaccagctagagcctctggagagagccgtgctgatgttgcccttgtgcacccccacagggcagctggtaaagatgctacygtatacagaggtgactcgctacctggacttcaaggtggtggagggcagctttgtctacaaggggggcaagatctacaaagtgccgtccactgagactgaggccttggcttccagtgagtgtgggccccctgagccagagaaatcatggggtggcagggaagccaactgtctttgggatgggtggctgtccagaataaggcacccccttgtccaaagtcacatttcccgtgaaggaccagagaggcccttcactctgtattccctctgccccatgtcatgctgcacggctggctgccaggagggaggtcctcacacagcagggatgtgatgtggaggggaacggggctccttttgaaagacttgagcctggccaggtgcggtggctcacgcctgtaatcccagcactttgggaggcctaggcgggtggatcacgaggtcaggagttcaagaccagcctggccaacatggtgaaacaccgtctcatctcaaaatacgaaaaattagctgggtgtggtggcatgcacctgtaatcccagctactcgggaggctgaggcaagagaatggtttgcgcccgggaggcggaggttgtggtgagccgagatcacaccactgcactccagcctgggcgatagagggagactccatctcaaaaaaaaaaacaaaaacttgagcctttggcagggcctccactgaatccccgagacatcgccaagtgtctgagccaggaaggcccttagagcccatccaggccaatcccctcttcatccaggtggggaaactgaggctaaaaagggtggagaggttaacctaagatcacaggacagctgggctgtgagtgggggtgcctgccctgctgggatggagagttttgtgctgcattgatgcagaacctcctcccgccgcgttccttagatctgatgggcatgtttgagaaacggcgcttccgcaagttcctggtgtttgtggcaaacttcgatgagaatgaccccaagacctttgagggcgttgacccccagactaccagcatgcgtgacgtctaccggaagtttgatctgggccaggatgtcatcgatttcactggccatgccctggcgctctaccgcactgatgagtgaggggaagctgggtggtggcagccccctcgcccggcccgcccccacccttcccacacctgcctgctgtccccctgccccgcatgtctcttgtactcagccacaggctcacctatcaccctttccatttcccccttgcatttgatcctcatcttccccaggccattcagggtggtgggaagactggcctggtacctgggtgggggtaaatcaggggtgctgctattcccccagytacctggaccagccctgccttgagaccgtcaaccgcatcaagttgtacagtgagtccctggcccggtatggcaagagcccatatttatacccgctctacggcttgggcgagctgccccagggttttgcaaggtgaggacatgggttttttcagttggcatagctgagtaggactagggccaggagtggagatggccgccttgagcattttcttggtagtatttcctcctttccaattcgtgctcttcatttacttcactccatccttgggtgatgagggcacaaccccagtgcactgaagtacagaagtctccacacttgaaaaaacgagtctccacaaatgtgacttgctcagttcccggcagcaccaggactgggcccagggtcccagaaccttgagtcagggcttagctgggagctgacctatctccagagagtccattctggtccctcaggctgtcttggtgcggagcactgatccctcatgccccctcccgctggcccttggcagtgtattctgagcagaagctccagagaggaaagagcccgcggagatggggccagcgttcacggcagtgacagagctgggatgaatcccggcgtctcctacctgctgcctgcctggggcagccttctttgcactttggtggaggaagggtgcagtggaattggtccccgtttctcctgggaggggccttcaccggagctgctctcaccacagattgagtgccatctatggggggacatatatgctgaacaaacctgtggatgacatcatcatggagaacggcaaggtggtgggcgtgaagtctgagggagaggtgagcccttcccgtgcatgcagtgcagtcccatggttgaggcggggcttggtcactttctctgtgctgtcgagtctcctgctgcacagccccaagggtcttggagctgggaactgggggtccagaagtcttcagagtcatgactgtgggtgagaggtctctttcagaggccacatgccatgtctgtggtgcagaaagtgttcttgatcacagtgcctctggggkgcgggggggcgggcacccagcccgtgcgtcaaggcccacctatctgagcggcagggtagggccatgcattcaggaggggcagtagtgatggctccgaggaacgtcttgtctgccagagctgcctgcccttgctgtgagcgcagccccacgtctacctaagggagggatgtgacaggggcgaggacttctggtgccttctcaggtggcccgctgcaagcagctgatctgtgaccccagctacatcccggaccgtgtgcggaaggctggccaggttatccgcatcatctgtatccttagccaccccatcaagaacaccaacgacgccaactcctgccaaataatcatcccccagaaccaggtcaacaggaagtcaggtaggccgggcgctggtacagcttcctctagggtgttctctttggggttactctttttctccccatcagtgtgggagctccctgccttacctctctggaaaaaaatttgagccacattgtagccaccacaacttggagccctagggtttgggtggcctggactctttccctctgggagggtggcggcttggatgctacctgctctgcggggctggggaggggcagtcgggccagacttgtgtccagccactggaacccctctctgcgtatggccagcgcctctggcctgagttgacggagctcttcytgtggccagacatctacgtgtgcatgatctcctatgcacacaacgtggcggcccagggcaagtacatagctattgccagcactactgtggagaccacggaccctgaaaaggaggtggagccggctctggagctgttggagcccattgaccagaagtgagggactgggctgagcccaagggggagagggagggagcccagcagctgggcttagggaccaggaagggcatggcccattgtgaggcctgtcccctcccctctgtctgcccctcaggtttgtggctatcagtgacttgtatgagcccattgatgatggttgtgagagccaggtaagcagctcgtcccagccctgggctcctggctgcccgcccaggatacctgtctgactcaccctgggcgctgggctctggctgtttc

SEQ ID NO: 94557 - DNA, 12980 bp, Homo sapiens
tgatgtagaaagacagactttattgtcctttccttgcccttcaggcctagatctctaacagtttgtcaagaaagagggtattgctaaagctgtctaggctttgcttttaaaagtcttgtaaggaatggcatgtcctgtggtgcccggagatacaaaaccttttttgttaaatcctggaagcttactgtataaaatgagtcttttctgtcaattgcaccactgggatagttgaccctgtagggcaactgatgcttatgtggtaactcagagatggaggggcttccatattatggtttctctatctcaaaaatgggcctctgattattgcaaaggaaacaagcaagaaggtcacacttagttttaagtggtttggcctgaaagtgatacattacacttacaccctgtttggcaaaaccggtctcatggttttaacttgaggcaaggtggctgagaaattaggggaatgttggctatgtatgtgaagctgttaaaagaatgaggaaagtcagggctgggcgcggtggctcatgcctgtaatcccagcactttgggaggcagaggtgggcagatcacaacaaggtcaggagttcgagaccaacctgaccaacatggtgaaatcccgtctctactaaaaatagaaaaattagctgggcatggtggcgcatgcctgtaatcccagctactctggtggctgaggcaggagaatcgcttgaacccgggaggcagaggttgcatgagccgagatcgcgccactgcactccagcctgggcaacggagtgagactccatctcaaaaaaaaaaaaagaaaaaaaaagaatgaggaaagtcatattggagtgatcaccaccatacctaaaaaacaaggtatagaatatcatatatggtattctctttgtgataaaaaaaatctgaaattaatacctatcaagaaacctatttaagaaaataaaaagtttgagaaggcaaaacagaatagggattttcatatatttgtaatataattttgactttagagacaaaaatattttacatgtggaaaagcaacgaataaaaagggaaactaaacaaattgaaaactaaaacaagatgggattattcattttttggaacaaatatagccttaaacattttaaatgttcaccctcaattgagtatattctatatatgcaaggaaatcctgtgaaggtctttaatgcttcattggaaatataggctccctctgaaaatccccaagttatgatataacagattacctttcggttatagtctaatatgaaaatacatttggaagtgtttacctctctcactttaaggtaagagggcatgaatttttttttaaatctcaaattcattttcctaccttgatagtggaattagaatatattaaaacttggagaaatatttttatttagatacaaatagagctcaatagaagtaaatctgtaagttaaaaaaaaacagtaaggacgtttaataatttttgtctttctttttgaacacccaaaagacaggcgataggctatatataatattagactctcatgataaagaacaaagtcagttaatgtaatctggctcttcccaaaattatggtgaccacgttgtcattaatataattggtaacaggtatttggtctgcaacatgtttgtgggttttgttgttgctgttgtttgagaaagggtgtccctctgtccagcccaggctgcagtgcagtagtgtgatcacagcttgttgtagcctcaacctcctgggctcaaatgatcctcccacctcagcctcccgagtacctgggaccacaggtgttgccactacacctggctaactttttaatttttttgtagagatgaggtctcactgtgttgctcaggctggtcttgaactcctgtgctcaagctcaaacgatcctccaacctcagcctcccaaagtgctgggattacaggcatgagccactgttcctggctttctaacttaattgtttctttctcttcctctgtttttgatgtgtgaatatgaaatttgaaaatccccgttcttcattaaaattacagtagccatttaacagaattaatattctttgggaaaaaaatatggaaatattgttttcaggtaaacaagacaaagcctcaaaatgaaaatggttttgccccttatcctatacccttctcagtcatacaccagccatctgcattctcctcaaggagaaggaaggctgagtgctgatggaggtagagtaggcagaatggacttctcaagaggatctgccacatcccaaactgcagcctccggacttgctattatgtgagaaagataaacttcctacttgttttttagtccctgtttttcagattgtcgttacaaaaatttttctacctgacagataagattgttatttttcactgggaatagaatgcagcatttgagagtgaatcttccattttcatggcttagaaaaacttcatgaaaacctttttccactgctgaggtggatctatttagttcatgttgcctgagatacaaaatgtgggaataaaagtagaattatgacctgctaatctacgagcctatgcattgcagtaactttcttctttgcatcgaaaaaaatgcattcgttcattcgttcattcattcattcaatacaaatgcacagagtccctgctctcagggattattctaatcattgatgatctagcaagaaactgaaccagttccctgctctcaagtatcttatgttctatacgggtaagtcagcaataattataataggaggataagttcaacaaagtgtacatgtagtgacagagtgacaggatgtcctaatttaaactgttcaggaaatacccataggataagatgatatttgagcaaaatcagtaattggactctgtcatatagatacaaatggggaaaaataattgggcagaggaaatggagaaaattgtcaggatgggaacatgtttataatgattgaggaatatccacaatcagcgcgtggcttggtgaggtgtgtgatcatatctgttggagacatttaaaatttgagacttcttatggttcacaatttttttatttcgggggacctaaaagtcaaaacacctatataaactgtttatatttttgcacgttgattcttgtaacaattcttttcctagaggggttaagatacaagtgtggatccagaatcatgatgacctatttgtggaatgcacagacaaatttatttacaggagcctctcagctgctggggagacgtgggggtagggtgaggtaatgagttaatgaaaagatagtaaataccatttgtcaaaactgtctgagagatttgatgataccagttctgcaaagacttgttaggatacacacctctgccatctacccctggggccacttaggggtatgttgctacttcctcttatgaatgcatgtcaagtaaaattagtggagtttttaagccccagtttttatctttactgtcaatgtcatcaaaaattattttcacataaaataccgtagtttctttctttcttttttttttttttttttttttttttttttttttttttttttttttttttttgagatggagtttcgctcttgttgcccatgctggagtgcagtggtgcgattttggctcaccgcaacctccgcctcccaggttcaagcaattctctgagtagctgtggttacaggcatgcaccaccacgcccggctaattttttgtatttttagtagaaatggggtttccccatgttggttgggctggtctcgaactcctgacctcaggtgatccacccgcctcggcctcccaaagtgccaggattacaggcctgagccactgcgcccagccattactgtagtttcaaatcaaatagcaacacaatcacgtatttcctatgttttccctggtataagggaaaagacctaccagttattcttttccaattaggagaaaccttgtgttccccttacactggattacaaaactgactgtacgctttattgccccaactttattgtaattcagatatgtgatgaaaatatgactctcagccaggcgcggtggctcacgcctgcaatcccagcactttgggaggccgaggcgggtggatcacctgaggtcaggagttcgagactagcctggccaacatagtgaaatcccatgtctactaaaaatacaaaaattagccgggcgttctggtgagcacccgtaatcccagctactcgggaggctgaggcaggagaatcacttgaacccaggagatggaggttgcagtgagccgagatcacaccactgcactccagtctgggcgacaaaagcaagactcggtctcaaaagaaaaaagagaatatgactctacatgagaaatcgacaaactttaaagggccaagtggtattttattctttgcaggctatacggttgcaaataccctactctgcctttaatggatcaatagtacctacacgtgggtttggccatgttccaagtaaacattatttaaaaacagatggtgatgatgcagggcaggtgagcccccagactggggattcgctcaggaaataattcaagggtgaactggtagtgggtagcacctcccccccacccccccccgagacggagttttgctcttgttgcccagcctggagtgcaatggcgctacctcagctcactgcaacctctgccttccaggttcaggcgattctcctgcttcagcctcttgagtagctgggatcacaggcttgtgccaccacgcccagctaatttttgcatatttagtagagatgggggcgggccttcaccatgttggtcaggctggtctcaaactcctgacctcaggtgatccacccgccccagcctcccaaagtggggtagcaacttttattggagcggcggcaacagcagcagcagatgaacggctccttgcagggcacggctaccccaaaaggagtgtgctcaaagtagcagctcagaggcaggtctgcagtcatatttatgcccacttttaattacatgcaaactaaggggcaggttattcagaaatttctagaacgggtgtggtcacttccaggtcattgcggtggaaaggggtggtcacttccaggtgttgcgatggcagtggtaaactgacatggcaatggggggcgtgtcttatggagaggtgcttttgcctcttccctgtttcagctagttttcaatctggtctggagtccaagccctgcctcctctctcagtaattcatatttgacttgtgtttcgtaacacatgatctacacaaaagaatgaggagtgccagaaatagtaaccacatgggtaatttttttgtttgttttgtttttgtttttgtttttcgttttttgtttttgagacggagtttcgcttttgctgcccaggctggaatggaacggtgcgatctcggctcaccacaacctccgcctcccgggttccagcgattctcctgcctcagcctcccgagtagctgggattacaggcctgcgccagcatgcccggctaattttgtatttttagtagagacagggtttctccttgttggtcaggctggtctcgaactcctgacctcacgtgatccgcccgcctcggcctcccaaagtgctgggattacaggcgtgagccaacgcacccggccccacatgggtaatttttaaacgtatttcttccgtttaaatctctttaaaatgtaactgtttagaaaataacaatctgcctcgggagcatgatccatgagttgctgccctggagccacttgtaggttatctaaaagttagatgtatgataatgacagcacacacaccaacagttgtgaaatgaaagtatacatgggtaaggatctgatgctttacatgaagtcgtatggaatcactggaaggtaggctgtgataagctgtatagtataacccccctaaagcaaatgctaaaaatttggttatcgttaacactaaagccaaaaaaggaattggaagagagccacttaaaaacccaaaggccttctccgcggcgctccgggcccgggcsgctggcctyaccgcccactgggtaaggaggctcaagctgagcccggcgctgccgccgcccttctcttgctctccgtgtctcccttagttttgggcgcaggagagccctgggctctacacgggcctgcaggcggcggcaaggacactacggccttagccctcttagggaggccgctgcagccccaccggaagacatgtgaggaattgcataagacagctatgcaaaatggagctggaggagctttatttgtgcacagagatactcctgagaataaccctgatactccatttgatttcacaccagaaaactataagaggatagaggcaattgtwaaaaactatccagaaggccataaagcagcagctgttcttccagtcctggatttagcccaaaggcagaatgggtggttgcccatctctgctatgaacaaggttgcagaagttttacaagtacctccaatragagtatatgaagtagcaactttttatacaatgtataatcgaaagccagtygraaagtatcacattcaggyctgcactactacaccctgcatgcttccaaactctgacagcatactggaggccattcagaaaaagcttggaataaagcttggggagastacacctgacaaacttttcactcttgtagaagtggaatgtttaggggcctgtgtgaacgcaccaatggttcaaataaatgacaattactatgargatttgacagctarggatattgaagaaattattgatgagctcaaggctggcaaaatcccaaaacctgggccaaggagtggacgcttytcttgtgagccagctggaggtcytacccctttgactgaaccacccaagggacctggatttggcatacaagcaggcctttaatttatattgaactgtaaatatgtcactagagaaataaaatatggacttccagtctacataaacaaaacaaaacaaaacccaaggcaacgaaagaaaagagaagaaagaacaaaggcaaaaacataaaatcaataccaagatagtttaaccatataataatcactttaaaaggaagtggtctaaacaccccagttggaagacattttctgttgccgtatgacacattgggaaacagcacccttggatgaacatcggcaattttattgtaactcgcatttaacacaaagcccctaagcctagaggtttttttttttatttttttatttttatttttattttttttattgatcattcttgggtgttcctcgcagagggggatttggcagggtcataggacaatagtggagggaaggtcagcagataaacaagtgaacaaaggtctctggttttcctaggcagaggaccctgcggccttccgcagtgtttgtgtccctgggtacttgagattagggagtggtgatgactcttaaggagcatgctgccttcaagcatctgtttaacaaagcacaccttgcaccgcccttaatccatttaaccctgagtggacacagcacatgtttcagagagcacggggttgggggtaaggttccagatcaacaggataagaatttttctcagtacagaacaaaatgaaaagtctcccatgtctacttctttctacacagacacggtaaccatccgatttctcaatcttttccccacctttccccgctttctattccacaaaaccgccattgtcatcatggcccgttctcaatgagctgttgggtacacctcccagacggggtggtggccgggcagaggggctcctcacttcccagtaggggcggccgggcagaggcgcccctcacctcccggacagggcggctggccaggcggggggctgacccccccacctccttcccggacgaggtggctgccaggcggagacgctcctcacttcccagacaggttggctgccgggcggaggggctcctcacttctcagacggggcggccgggcagagacgctcctcacctcccagacggggtcgcggccggttagaggtgctcctcacatcccagatggggcggcggggcagaggcgctccccacatctcagacgatgggtggctgggcagagacgctcctcactttccagactggacagccaggcagaggggctcgtcatgtcccagacgatgggcggccaggcagagacgctcctcacttcccagacggggtggtggccgggcagaggctgcagtctcggcactttgggaggccaaggcaggcggctgggaggtggaggttgtagcgagccgagatcacgccactgcactccagcctgggcaccattgagcactgagtgaaccagactccgtctgcaatcccggcacctcgggaggcggaggctggcggatcactcgcggctaggagctggagaccagcccggccaacgcagcgaaaccccgtctccaccaaaaaaatacgaaaaccagtcaggcgtggcggcgcgcgcctgcaatcgcaggcactgggcaggctgaggcaggagaatcaggcagggaggttgcagtgagctgagatggcagcagtaccgtccagcttcagctcggcatcagagggagaccatggaaagagagggagagggagaccgtggggagagggagagggagaaagagggagagggagagggagagggctattttttgtatttttagtagagctagaggttttttttaatttgtttgtttgcttggggttttctttttgtttttgttttgtcatcaatgtgaacttcctgattgtaaggggaccatagtcagtaactgagcatgtctgattctgatgattagtaaggtgaaggaggcagggtgaaagagggcaagtttcttgaagatatttacaaatatctgatgatgataaaccaattgggtaaagttataagtgagagaacaaatagttcattgagggtggtcacataataaaaggtaatatatttctagatgaattaaaaataaatggtttttttttctttttttgagacggagtctcgcactgtcacccagggtggagtgcaatggtgccatcttggctcactgcaacctctgcttcccgggttcaagtgattcttctgccccagcctccggagtagctgggattataggcgtgtgccaccatgcccagctaattttttgtatctttaatagagacagggtttcaccatgttagccaggctggtctcaaactcctgaccttgtaatctgcccgccaaagcacaaatccaaagcgctgggattacaggtgtgagccactgcgcccagcctaaaataaatggttattctaatggaagtaaaacatataaaacggaaaggaagaaagtaatcatatgaagaaaattctcaaatgcagatttcaaagttcgtacaagtagtggagataatgagctactatctgtaactgtggatttggaaggttaaggtgagtaaagaaaaaacaggtcattgaaagtgtactttcagctttctggaagttgtaatgtggtagcaaatatctttgaattctcagaggcttgcaagaacaaacgtttatttcttcctcagaactattattattcagcacttagttccacaatgcgatgctgggattcagggtaagattcagtctctatcaggacataccatattagtagcagagaaaagagagggttagaagaagcaaatgaagcctcttctagcttccatttaaattcaaacaggcaagtttctctcaccaggcctcgggagcatgatccacgagttgctgccctggagccgcacaattttgtagctttcttggcagaaccaggtactcaaagggttgcgcacagcagggagtagagatgactcttgagttttccctgcctaaggatggatgcatatagctgaggggtgccagctgtctgggtagagcctgccccctgagcaagtggggccccaagctgacctcaccctcaatatgtgcagccttttatagcacagtcatgggtcacctaatgatgaggatgtgtgctgagaaatttgttgatttcatcattgtgctaacgtcatagggtgtacttacacaaagctacatgggatcgcctactacacacctaggctaaaccatatagactttttacaataatttacaatagactcggctcactgcaacctccacttccatggttcgattctcctgcctcagcctcctgagcagctgggactacaggcacacaccaccatgcccgactaatttttgtatttttagtagagacagggtttcaccatatagactgttgatcctaggctacaaatggggacagcatgttatcataggcaattgtaacaccatggtatttgtgtatctaaacatgtccaaacatggaaatggtatggtaaaaatacagtattctaatgggaccaccattatatatgcagtcctttattgaccaaaatattgttatgcggtgcataactatgtatcagctgcatctcagtaaaactgttgaaaacaaaaacactgtccagatgaattcagctgggcttgatgcagcctgggaatctgcattttaccgatttccaagtcattcgagaactctggtgagtcaactgcctttgggggagttttagttattttctctgagcaaagaattttatatcattcctgcaataagcctaagaataaagaaaaaagctacaagaatgacattgacctacttgaggaaggtggcttatatcaaccaaaggacatacccatgagaaacaattttttaaggagctgaaaatagtctaaatgattataaattaattagagaaaattgacacggacaatcaacaaataagttgacagtttctccaacttattgatagtttcttatttaaaaaaaaatatttttaaaaattgaaacatgtcatctctactcacaccaaattggccaaggaattcacaaagccaagcctatcataaattgggcaaggaatttcaatccttgacttgaagcattgcctcaagtcaagggccatgcctgatatcaaagggcagagttgtataatttcataggagggtgataattaattgggaataattgacaatataggacagagagctgcaaaacgtgtgaaacaagtgatagaactgaaagaaggaagacaatctaggtggagcacagaggattttgaggacagtaaaagtaccttatatgataccatgatggtgaatacatggcttcatacatttgtccagactcagactatacaacacaaaagtgaaccttaatgtaaacatgaactttgggtgataatgatacgtcaatggaggttcattgattgtaacaaatgtaccactctggtgggttgttaataatgggggaggctgtccttgcgtgggggtacagtgtatatgggaaatctctaccttccacttaattttgttgtaaacctaaaactgctgtttaaaaagtctattaaaaatgaattagaaaaaggcaaagatatttaagaacatttcactgaagcagatccacaaacccaataggcaaatacaaagattttcagcattactgtccatcaggtgttcagacctcagcattttctgcttcctccataagagccacagtctgtcttcacggatcttggaaatagaacggcctctacataacactccaaatatctctttggtgatgttcattaggaacttgaagttgtttctgataattggtaatgaaaagtttttcagaagcaagcatgcactcatggtgaattgaccattgtagttctatgaaaagatggtatctcaaatgacaaactcataactcagagactggctggctccctccccctacacacactaggacatcatactaagcccaaagtcctggcagtaagaagaaatcagatgagtattttctattttagtatgtgaggcagagtctgtatgtaagggaaacaggagtatgctgggtctctgtgagtgctcacatctgaaaaaggagattcctctggagtagaaactattcctgtggcaaagatacaaaagtaggagaaataatttctgagatacagactgagtctgtggagacagactagaggtcctatcccccacaccaatccctgatggtgactattgatattttatctatgtagcattcaatgtgagattaaacttttctgtggttttaaactctgatttagctgccatacaagagtccctgatattattttcaggataatagagtaattattgtaaaacctctatgcatacaatgacgttaaaaatggaatacagtgatctcattattacagaaactatgtgtctgggtgaacgtggctagaatatgcgtcttttctccaatgctggccttaccatgtgctaaacggagacaataattgcatttaaacaggacatctctattgtctggtgactacagtgagagtaacttccctccggagttcacaaaagaaacattttagaaaacgttaatgtcaccagtgtggctttcataccaatataacttcggcagtttacacattcaaatatatcatgtgatatttttctttttttttgttaaaaaatatcttttcgggggcagctgatagaaatgttctaagatttgaatgtggggatggtttcacaacttatagcaagtgtattaaaagtcaatgaattatatacttaaaatgaaacaattttatggatataaattagatctcaacaaacctgttttttaaattccagtgttaactctgaactcactacaaatctaactatatcaatttacttaatgaacacatttccgtatcttccaggtacaattttacatcttttgagtatatttcaattattacattaattataataaagttgctgttaatagccatccattaatgaacaaataattatattatctaaaatcaataatttagtctgtacgctaaaattttttttttttttacttatttattttttgagatggagtctcactctgttgcccagcctggagtgcagtggcac

SEQ ID NO: 94558 - DNA, 47520 bp, Homo sapiens
aagagattaactatcactaatactaaaatagaacaattataactatatgccagcatcagctttggggccattattaagtaaaacagggttacctgaacacatgcactgagataatatgatagtcaatctgataaccaacagggctagtaagtaacaacatggatatgctggacaaaaagattcacgtctcaggttggacggcacaaaatttcatcatgctatgctagactggtgtgcaatgtaaaatttatgaattatttctgaaattttccatttaatattttggactacagctgactgtgggtaactgaaactgtggaaagtaaaattgtggataggctggtgactactgtatagggtccaagtccagaaaaggtagggtcctcaatctgcagcaactgcctgaatgtgattaggatggagtaccacgcactgtgggttagtggttctgaacacaactaggctgagcagcgtcaactatatcagtatagcagagggcaacaagaggaagaggtctctttagtagtcttacaagactacttgtagtagtctcatgatgatcttaagagattttgatgggcttgcctgtatgacctcaatcgcagataaactgtcctagttctctaataaacaaatatctcacccgtagaattaagatcccagaaaaggaggtatttgctaatttgtattattccttttggtcttatatacatgccactatcttctcccagtttgtggcttgttgggtccatgctcttctttccataaatattatgtgccacatagggaactaagcactgtgcacaccatgcaaaacaagacagacaagttccttgccctcatggagcttacattctactagagattatattctagtggaggaaaagaacatagaagacagacaatagtgaagtaaaaataaacacagacattcatgatcataaacaaatgaaatggggatggacacttgcttttagtaagaaactgtaggagagatataattaaggaggctaacatttaagtggagctctgaataatgaggagacagtcatagtaaggggtgggaacaaatataaagtccaaagcagcaagcttctgcttgggaaattggtaggacagcatggatagggtatagtgaaaagagaaaaagggatataaaagatcaggctggaagagcaggcagaagacagactgcacaaagggctttgaaaggcatggtaaggaatttgagttttattctgagtattattagaatactgaggagtttctgaagccactgacaagcttaatgtagtatatgaactgaccattttttcatttttgccaattgagagataagggtggaggctgggcacggtggctcatgcctgtaatcccagcactttgggaggctgaggcgggcagatcacctgaggtcaggagtttgagaccagcctgaccaacatagtgaaacccggtctctactaaaaaaacaaaaaattagctgggtgtggcggcatgcacctgtagtaccagctactcgggaggctgaggcagaagaatcgctttaactcaggagccagaggttgcagtgagctgagatcacgctactgcactccagtatgggtgagagtgagactctgtctcaaaaaaaaaaaaaaaaaaaaagtcagagagagataagggttgagatctattagagtaacaactgttaaaaactttgttttgtgagacaggttctcatcttactctgttgcccaagtagctggcactacagatgtgcaccaccatgcctggctaatttttgtattttttttttgtagagatcgggtctcactacattgccctggctagtctcaaactgctgggctcaagagatccttctgccttggcttcccaaagtgctgggattgtaagcgtgagccactgcacgtggccgcaagttgtatttaatagcaatactaaactttccatttacaaaaatacacaacaaaatgcctttaatctgtattaggcacttactacttttccaatggatgtgttttatcaggtttaaaacagtttaagataaggaaatgccatattctgaacaataggttaccttaagtttataacatattggcaagcattcaaattaccaaataaattttaaggtcaaggaaagcactcaaccctgaatagtagtctatattttattttattttgagatggagtctcattctgtcgcccaggctggagtgcagtggcatgatgtcagcttactacaagctccaccccctgggttcaagccattctcctgcctcagcctcccgagtagctgggactacaggcacccgccaccacgcccggctaattttttgtatttttagtaaagacggggtttcaccatgttagccaggatggtctccatctcctgacctcatgatccgcatatctcggcctcccaaagtgctgggattacaggcattagccactgtgcccagcctatctttattaacataaagtacagatatggttgacagcataccattaataacaaataataactattactccccactttaaaacatgattaccggtatttgaaatcttttcagagcaggcagtgcctgcgtttcctggggcaaccaacacttgtttgacatgatgagactgtgcaagtttccaggccagcgtatgttcccttcctccactgccaattataagtactcgggctgccattgttctgtctgtaaagcagaaattccaaaggaaaatgaaacctgcagaaagaaaaccacagtttatatcttaggatgcacattttagaaacccagggacgggcacagtggctcatgcctgtacccccagcattttgggaggccgaggcaggtggatcacttgaggtcaggagtttgagaccagccttggccaacatggcaaaacctcatctctactaaaatacaaaaattagccaggcatggtggcgggtgcctgtaatcccaggtactcaggaggccaaggcaggagaattgcttgaacctggtaggaggagatcgcagtgagccaggatcacgtcactacactctagcctgggaaacagagcaagaccatctcaaaaaaaaaaaagaaatccagatttgtaaatataatttaagtaatcatttgtactcatacaaatgacattttcatccaatgattcatttttgaaaaactgggattcataatttgagaaatatgactgtcgtcataagcataagggaggtatttcaaaaagaaggcaggctggcctagagagctaggttaaggagtcaaacgatgactctcagctccttatgtgataatctcccttctctgggcttcacttcaaaaagatttaataatcatcatgccttagttatgaaatgaatcttgttttagactcaaaatgtattataaaatatcaatttttaaaccttgaaatcttacagataattaggttatcataaattaaaggatatactgaaaactggggtaagcaaactttacacaaaaagggccacatagttctgtcaaaactactcgactcggccaccttagcaggaaagcaaccaaagataatacgaagatgaatcaatgtgccaatgtccagaaaaatttaatggacccataaacaggcagtgggtcagagatcactgttgcctatcagtactttaagtagcaggaaaccatcaaaggtttgtaacaaataaacgtgactcgctttcaataaaactttatgtacggatactataatttgaatttcataaaattttcacatgtcacaaaaacctcatttatttcctgttctttttctcaatcattcatatttggtgagctgtacaaaagcaggcagcagaaggatttggtatgtgggccatagtttgctgactcctaattcaaatagcgcaatatgctagaatattggtagagaaggcaaaaatcaaattccaactcatttcactttagttctggcacctgagacttagaaggatggatacaacagcagtgtaacctaggagattaactgaaatgacatttataaataagtacaatctggcactcagcagtagtaaatgttaacttgttacatttacttaccacaagacaaactggtaacaggaaaaagaaaattgaaaacttattttgatgatgttgggattacatattttaagaaaaatgtaagctgacaatatacaaaactaacatttttttgagcacttaaccttgggcagggtactatttaaaatgcttgtcatgaaagaatcctatgagggagatactattactatcaccaatttgcagataagacaaggaggcccagataggtaaataacttgctggaggtcacacaggtaagagggggtggagcctaacagaagcaattttgcttcagattctctcaacaagtgaaacgatgatcattgaaaatttgagaaaggaaaaaaaaaaaccctgttaaattacagtctcggaaggaacagctactttagtgtaacgggaaaacacattttacttgccatgtgtatctgaaataaacagattttttattttatttatttatttatttgtttagacagtctctctctgtcgcccaggctggagggcagtggtgtgatctcagctcactacaacctccgcctcccgggttcaagcgattctcttgcctcacagcctcccaagtagctgggattacgggcgtgcgccgccacgccaggcgaatttttgtatttttagtagcgacggggtttcactacgttggccaggctggtctcgaactcctgacctccaatggtcaacccaccttggcctcccaagtgctgggattacatcacatccggccagaaataaacagatctttaaatctagagcaaatgttacatctttagtttgaatatagcagtagtgtgggaaaattctgtttactctagtggatcactgaaaatagccttactacccagtggtgaggacgcctgggctcctgagtctcacacagcgccttggcctgggtagagacgctgccccatactagcaggaagaccttgggggacttcactaaccttgggcctcattcctcagaatgggtaacataagcagaataagacaggcaaataaagccgtatcagaggatatggagaataaagtagaaaccaactacaaaattaaccaagtaatctgccagagacaacgggtgcataaagagaaagtacaccaatttagggttatgtcctaaaaatgtataaagacacaaaaaggccttgacatcttagaaaacaggaaaagtaaaagagcaaatagaaaccagctaacagtagcaagtgaaaagcacatggccaacccccacccaccgcatttacaaacaacaggaaaatttctacaaatcagtttctatggtttcactcagttcgcgatcttaaatccccaaaccaaagcctaagcgcgctccgtgtaaaagcggagggggtttacgcaccgacaccgggtggccacctggttcccgcttgcccgctcgccggaagtcggcccaccgggaccggcgcgggaccagcgcggcaccgcccctcactgccccgccctacgacggcttccctgccccattggtccgcgcggccctgggtctccgcggcgagaatctagtctgattccctcccgccctgggcgctgcctgactgctccccagccgagacacccaagccttagcacgtttataatgtgacagtggtacggggtgccacgcagtgtttccaggagcgccgggggggagcgccaaaatgctaaacccattcttagccaattgtgcgccgctcacgagtcagagctgagcagctaccgcggaaaaatctcgtgacacgcctgactcctgatgagactaaaatgcaccgggctttgaatgccggtcgcttaggacatccggcctattgctaaaaaaaaaaatgaggctggttatagaacgcactggggaagacacagggcaacagcgagttcctcctctcacatgccagtgggggcgggggctgaaaaattctctcccggatgcatatccctgtcgaaactgaacttggcgccacctgagagcgcctgaaagccgtgtgttaaacaccgggttgcccttcttgctcttcttcctcttcgcctttaatctcaggcacttagcaagcctgttaaggctcccaaacactgctggggactgacaacttatgcggacacggtcgcctcaagagagrcggctcctgtaatggcgcctgcgtcagacactaacatggcggacatagtcgtgcgcggcgcaaacgtcagcacctctaccccagccgctcagaaacagcagaggagagcagggccgtgctcactgattggtccctcggtggagcgggccggaccgggcattccctttggagccaatcaggaaggcgagagaccgaattggccsstgcgcctcctcccgaggcatgctgggagcctggaggactagcgaggaggagttgagagaacggagcggacgccatggcgaccaacatcgagcagatttttaggtctttcgtggtcagtaaattccgggaaattcaacaggagctttccaggtaaacgcctcccagattcttctgctcccaacggaccgttaggccctcacctagccttctttggcacctttcttcggagacgcagtcgttccccggctcaggccccgctagggccccgcctgggcctgggatccattttccgggccccccccaaccgcccccccagccgctcccttccttttccctcgaggaacttcgccttttccgaggtaacccaagactccctgtttcagaaccgagttaagatgttcacccttctcccctgtttgggtcccccctgccgtttagctactcgtaggcccggttgtccgccagggacgggcctagttccttcctcagctcctcctccgccgccgcgtatcccctccccctctcgcctccgcggattttgccggccggtgcctatgaccggaaagggtctctaacggccgtttcttggttaatcttaaatcctctttattattgcgagcttcagaccgcttgggggtctggatctattaataagattattcggggcctagtgtcctgtagtatctgtcagccgttctgatagttaaatgtttcaattaaaacgaactcaaactgatgcacttgctagtttgttaaaatactcgagataaagatggaaggggactttgaaatggttgcgattaattacagcaagtgaaagtggactttgtgtgtaggtctattattttcttgctacccctgccccagttgacacgctatttttgtcattgctggtagactttacataatttgcgcttggcttcacaaaatttgaaggcgaagagattgttaaagaaatggttgtttacttaggaaaatagtgtgtcatgttcagcggttgtctctcgatatttgcttttgtataagatactcatttctttaaagtacagaagtaggaaagagatcttgaaacgtaagtgttccgagttcaagtgtttttaattgtattttaaaagttgagagcaagagcagtacgtgaatttgaaaatgggccgaaaaccagttgtaagtgcccaaagtaatacaggattattagggcaatgatgtattattgctagaattatcacttttgcagaatgtgttgttttttaagtggaaatagatccactcacattgctttttaaatttttgtgatattgctagtagtgttttggatgagaagagacccgagctaagagaatataattttcctgacaaatctctggctgcaataagtagttgtttgcttagtttaacgaggtgtgtttttgtagcttttaaaagctagtctttcctttagaaaatgagcgttttattataatttagaagacatgaaaaaggagaaaagaaaaaactcacgttattgatattctcatgtcatttcatttccccccccatgtattgtgtgatatgtgatcatcttgttttgtattgatcatttttccagctaatacgttgtgaacaggtttatccctctcagtctcagtcttttggacttcttcatggctgcatagaatcccattgtaggaatatactgttgcatatttaggtggtttgaaattttcattgcttttcagtaaatgcggttaacgattgctggctttaagatgaaatcattacttccttgtagattaacttttaaaaccataattacttttctgattttcaaatttgtcataattatgtataaatgcttaggaaaattgtaaaataaagtgctacagaaggaatatctaaaaataatattagacgaagcagtttattactagaggaatatgcagcttctcttcaacacataatgcgttatcagtctgcaaacaagtttttgattatttgccatttcagtgagctgttttttttctcatctgcttttatgtaaattagagtaatgaggctgacatttagatagttaaaacaagttatcgaacttctgttatagatggtgtgtaagaatatggcctctggtttgagtaccagcttcacctcttagtagctgtgtgaccttcagctaagtttcttcatttataaaagaataatagtggtgatctcagagttttgttaggattaaatgagttaatgtagaacagtatgacactagtagtcaataaatgataattattataactataattatacaattcattgtattagaaagccagatgttccttaataataattaggtaactactgaattttttttggtttttgaccattcagacttttatcaggtagtggagcataattgatgtgttttcatttagctaaaattgaagttaaaatcaaactgttgctgaaagtatttgatttttcaaaattttgcaaattcacacaaaaatagtaaaaattactgggcgaatgatatgttcttacctatttaaaaatttctctggccctgtgaatggaacatgtgttaagccatctatgcttttactgttggtataaatgccacttgttttatgtgagttttataaaccagagttcttgataattgtgtaaaaattacataaattattttcctttttaagttcagtggcatttcagtagcaatgtaagcctggacagaggttacaggttaccctttttattcagtgtgcctgtggctaacttttgtgttccttgatactattgatggtgattgtgatttatgcacagctgtggctttaatgtagccatggtttctaccataatgttaggccacatgtttttcttttgatttgtgaccgggctcttattaatttttctcccctgaaagaaatatgtgggtatcccaaaagcctaaagttagatttctgaaattattttgtttaacaaagagtgtacttagaaacctgttttcttaattttcatagttctgaaaactttaattgtataaaaatgaaatgtccaaaatataagtagatcatggtaagaagcattattagtggtgaatatctaaaataggaaaaaggtaaaacatctgacagtcagtacaacatatgattattgtaattaattggatttttttattaatggtatgataaaatattaatgaatttcgataacttttcatgtcaagtggaaggaatgaaggccagctgaatggtgaaacaaatacacccattgaaggaaaccaggcgggtgatgcagctgcctctgccaggagtctaccaaatgaagaaatagtgcagaagatagaggaagtactttctggggtcttagatacagaactacgatataagccaggtaagttggagataattaactgtctcaaaaattttcttttaagatttttttgaaatttgaaggttaatgttagtttttgacttcagtatttaagatatttattaaattaaaaactttaggctgggtgcgatggctcacgcctgtaatcccagcactttgggaggctgaggtgggtggatcacctgaggtcaggagttccagaccaacctggtcaacatggagaaacccccatctctactgaaaatacaaaaattagccgggtgtggtggtgggtgcctgtaatcccagctacttgggaagctgaggcaggagaatcgcatgaacccaggaggcgaatgttgcagtgcgctgagattgcgccattgcactccagcctgggcgacaagaatgaaactccatctcaaaaaaaaatttttttttcagtaaatttaagcttttgtttaattgatttaatgaagactttcttgtttaaattttccttccatacttccactggaaaacaaacattgatgtacttgtttactctgctggtagaatataatttttatttttgacttagtttcagtttatttgattcagtttctttttcttttcttttcttttttcttttttttgagacagtttcactctttttgcccagcctggagtgcaatggcgtgatctcggctcaccgcaacctccgcctcccaggttcaagtgattctcctgcctcagcctcccaagtagctgggattacaggcgcctgccaccatgcccggctaatttttttttgtatttttagtagaaacggggtttcaccgtgttggccagggtggtctggtctcgatctcttgacctcatgatccgcacaccttggcctcccaaagtgctgggattacaggcgtgagccaccgcgcccggcttgattaagtttcttagtatcaggaatttgagtatggatttttattaaacagttgtgtaaaaatacccatcccacttaaactgcagtggatggagaggaatcattgcttgaatatttagcgtttttggaattgattaattgatgtttagaaatgaaggatttagccacaaaaataacagtcattaccttgatttagttctggaatcaagtttgtaatatggttggtttgtcctcttttttggggggaactttagctgtgcttagattcatgactctcaaacagacttgcttagattcatggctctaacaaccttcattgaagtatgacttatctaacattttgtattatgaaacaaacaattaatagaaaatggtaagttttgctttggcctatgtcaagtgttgatttattttcttctgtagtctttttttttttttttttttttttttttgagacggagtctcgctctgacgcccaggctggagtgcagtggggtgatctcagctgactgcaagctccgcctcccgggttcacgccattgtcctgcctcagcctccggagtagctgggactacaggcgcacaccaccacgcccggstaattttttgtattttttttttttttagtagagacggggttttaccgtgttagccaggatggtcttgatctcctggcctcgtgatccacacgtcttggcctcccaaagtgctgggattacaggcgtgagccacagtgcccggccttttttctgtagtcttaatggctcagatttctgatgagcttttttgggggtccctaagatttatctaatttgatattggcattagagtaaataaatcccatctggttgttaaagttgaatactcccatctctttagggtatgtaaattcaaaccttcttaagttgtaaattaaggactaagaatttcctctctaaaatcagtattcttttctaaaatagaaacatttgaaaagttatttattagtggttttagaatagtattgggggaaaatgttatctctttagggtatgtaaattcaaactttcttaagttataaggactaagaatttcctctctaaaatcagtatccttttctaaaacagaaacatttaaaaagttattttagtggtttcagaatagtattgggggaaaatattatttttattagaatgtaacgtaggcatgataaggtaaaatttgagttctctatgaatattttatatttgttattcagatatttttatactctgtagaagcaatcactaacctttgttgaaagcttattctgtgccaggcattatttgatgtactttgcatgttttaactcactttatcctctaactctagaagacacaagtgtgtcagtaatttggccaagaccattaacctagtaagtgatgaactgattgaggattcaaaagtggcagtctgttccagagccagtgccatgttgcttcctgtataaacaagggttaataatcgcaaaaattatattatgtgggtatttttaatagaaactgtagcaactaataacatgaaatatattcagtgacaaaagtagtttaaaagtaattttgctatgatttgagagctggagggaataattattttaatagaatttagtgaaacatgtcttaatgtaattcaaagtaagttttggtgtttaataatttatttttaacccaggcattagttgtggaaagaattatcagaaaagtagtagtctccaggttaactgttttatgaaaaatagtttatttggtaacttttaatttaacgtgaggtgttatactgtggggtttttttttttttttgagacagagtcttgctctgttgcctaggctggagtacagtggtgcaatttcagctcactgaaacctcgacctactgggttcaagtgakccgcctcagcctcccaaatagctgggactacaggtgcgcgtcaccatgcctggctaatttttgtatttttagtagagatggggtttcaccatgctggccaggctggttttgaactcctgacctcatgatccacctgccttggcctctcagagtgctaagattacaggcgtgagccactgtacttggcctgtactaaggtgttttaacatggaatgtaaatatgggtttatatgatttaatctaactctactttggggaatgtctgacaaaattaatttctattacttttagacttgaaagagggctccagaaaaagtagatgcgtatctgtacaaacagatcctactgatgaaattcccactaaaaagtcaaagaagcataaaaagcacaaaaacaaaaagaagaaaaagaagaaagaaaaggaaaaaaaatataaaagacagccagaagaatctgagtcaaagacgaaatctcatgatgatgggaacatagatttagaatctgattcctttttaaagtttgattctgaaccttcagctgtggcgctggagcttcctacaagagcatttggcccatctgagaccaatgaatcccctgcagttgtgctagaacctcctgtagtatcaatggaggtatcagagccacacatcttagaaactctgaagccagctacaaaaactgcagaactgtcagttgtatctacatcagtaatctcagagcagtcagagcagtctgtggcagtaatgccagaaccatccatgacaaagattctggattcctttgcagcagcaccagtgcctactacaacactggtgttgaagtcatctgagccagttgtaacaatgtcagtggagtatcagatgaagtctgtgctgaaatctgtggagagcacatctccagagccatcaaagatcatgttggtagagcccccagtagcaaaagtgttagagccttcagaaacccttgtggtatcatcagagacacctactgaggtgtaccctgagccaagcacatcaacaacaatggattttccagagtcatctgcaattgaagcgctaagattgccagagcagcctgtagacgtaccatcggagattgcagattcatccatgacaagaccgcaggagttgccggagctgcctaagaccacagcgttggagctgcaggagtcgtcggtggcctcagcgatggagttgccggggccacctgcgacctccatgccggagttgcaggggccccctgtgactccagtgctggagttacctgggccctctgctaccccggtgccagagttgccagggcccctttctaccccagtgcctgagttgccagggccccctgcgacagcagtgcctgagttgccagggccctctgkgacaccagtgccacagttgtcgcaggaattgccagggcttccagcaccatccatggggttggagccaccacaggaggtaccagagccatctgtgatggcacaggagttgccagggctgcctttggtgacagcagcagtagagttgccagagcagcctgcggtaacagtagcaatggagttgaccgaacaacctgtgacgacgacagagttggagcagcctgtggggatgacaacggtggaacatcctgggcatcctgaggtgacaacggcaacagggttgctggggcagcctgaggcaacgatggtgctggagttgccaggacagccagtggcaacgacagcgctggagttgccggggcagccttcggtgactggggtgccagagttgccagggctgccttcggcaactagggcactggagttgtcggggcagcctgtggcaactggggcactagagttgcctgggccgctcatggcagctggggcactggagttctcggggcagtctggggcagctggagcactggagcttttggggcagcctctggcaacaggggtgctggagttgccagggcagcctggggcgccagagttgcctgggcagcctgtggcaactgtggcgctggagatctctgttcagtctgtggtgacaacatcggagctgtcaacgatgaccgtgtcgcagtccctggaggtgccctcgacgacagcgctggaatcctataatacggtagcacaggagctgcctactacattagtgggggagacttctgtaacagtaggagtggatcccttgatggccccagaatcccatatattagcttctaacaccatggagacccatatattagcatccaacaccatggactcccaaatgctagcgtccaacaccatggactcccagatgctagcatccaacaccatggactcccagatgttagcgtctagcaccatggactcccagatgttagcaactagctccatggactcccagatgttagcaactagctccatggactcccagatgttagcaactagcactatggactcccagatgttagcaaccagttccatggactcccagatgttagcaaccagctccatggactcccagatgttagcaaccagctccatggactcccagatgttagcaaccagctccatggactcccagatgttagcaaccagcaccatggattctcagatgttagcaaccagcaccatggactcccagatgttagcaactagctcaatggattcccagatgttagcatctggcactatggactctcaaatgttagcttctggcaccatggatgctcagatgttagcgtctggtaccatggatgcccagatgttagcrtctagtacccaagaytctgctatgttgggttcaaaatctcctgatccctataggttagctcaggatccttacaggttagctcaggatccctataggttgggccatgacccctatagattaggtcatgatgcttacaggttaggacaagacccttatagattaggccatgatccctacagactaactcctgatccctataggatgtcacctagaccctacaggatagcacccaggtcctatagaatagcacccaggccatataggttagcacctagacccctgatgttagcatctagacgttctatgatgatgtcctatgctgcagaacgttccatgatgtcatcttacgaacgctctatgatgtcttatgagcggtctatgatgtcccctatggctgaacgctctatgatgtcagcctacgagcgctctatgatgtcagcctacgagcgctctatgatgtcccctatggctgagcgctctatgatgtcagcttatgaacgctccatgatgtcagcttatgaacgctccatgatgtccccaatggctgatcgatctatgatgtccatgggtgctgaccggtctatgatgtcgtcatactctgctgctgaccggtctatgatgtcatcgtactctgcagctgaccgatctatgatgtcatcttatactgctgatcgttcaatgatgtctatggctgctgattcttacaccgattcttacactgacacatatacagaggcatatatggtgccacctttgcctcctgaagagcccccaacaatgccaccgttgccacctgaggagccaccaatgacaccaccattgcctcctgaggaaccaccagagggtccagcattgcccactgagcagtcagcattaacagctgaaaatacttggcctacagaggtgccatcatcaccatctgaagagtctgtatcgcagcctgagcctcctgtgagtcaaagtgagatttcggagccttcagcagtgcctactgattattcagtgtcagcatcagatccctcagttttagtatcagaggctgctgtgactgttccagaaccaccaccagagccagaatcttcaattacgttaacacctgtagagtctgcagtagtagcagaagaacatgaagttgttccagagagaccagtgacttgtatggtatctgaaactcccgccatgtcagctgaaccaactgtgttagcatcagagcctcctgttatgtcagagacagcagaaacatttgattccatgagagcctcaggacatgttgcctcagaagtatctacatccttgttggttccagcagtaactactccagtgctggcagagagcattctggagccgccagccatggctgccccagagtcttcagctatggctgtcctggagtcttcggctgtgaccgtcctggagtcttcgactgtgactgtcctggagtcttcgactgtaactgtcctrgagccttcggttgtgactgtcccggagcctcctgttgtggctgagccagactatgttaccattcctgtgccagttgtttctgcgctggagccttctgtgcctgttctggaaccagcggtgtcagtccttcaaccttctatgattgtttcagaaccatctgtttctgtccaggaatcgactgtgacagtttcagagcctgctgtcacagtctcagagcagactcaagtaataccaactgaggtggctatagagtccacaccartgatactggaatctagtatcatgtcatcacatgttatgaaaggaattartctatcctctggtgatcaaaatcttgctccagagattggcatrcaggagattgcattgcattcaggtgaagaaccacatgctgaggaacayctgaaaggtgacttttacgaaagtgaacatggtataaatatagaccttaatataaataatcatttaattgctaaagagatggaacataatacagtgtgtgctgctggtactagtcctgttggggaaattggtgaagagaaaattttgcccaccagtgagactaaacagygcacagtattggatacctaccctggtgttagtgaagctgatgcaggagaaactctatcttctactggtccttttgctctggaacctgatgcaacaggaactagtaagggtattgaatttaccacagcatctactctcagtttagttaataaatatgatgttgatttatctttaactactcaagatactgaacatgacatggtaatttccaccagtcctagtggtggtagtgaagctgacattgaagggcctttgcctgctaaagatattcatcttgatttaccatctaataataaccttgttagtaaggatacagaagaaccattacctgtaaaagagagtgaccagacattagcagctctgctcagccctaaagaaagtagtggaggagaaaaagaagtacctccccctcctaaagagacactgcctgattcaggattttctgccaatattgaggatattaatgaagcagatttagtgagaccgttacttcctaaggacatggaacgtcttacaagccttagagctggcattgaaggacctttacttgcaagtgatgttggacgtgacagatctgctgccagcccggttgtaagtagtatgccagaaagagcttcagagtcttcttcagaggaaaaagatgattatgaaatttttgtaaaagttaaggacactcacgaaaaaagcaagaaaaataagaaccgtgataagggggagaaagagaagaaaagagactcttcattaagatctcgaagtaagcgttccaaatcttctgaacacaaatcacgcaagcgtaccagtgaatctcgttctagggcaagaaagagatcatctaagtccaagtctcatcgctctcagacacgttcacggtcacgttcaagacgcaggaggagaagcagcagatcaagatcaaagtctagaggaagaagatctgtatcaaaagagaagcgcaaaagatctccaaagcacagatccaagtctagggaaagaaaaagaaaaagatcaagctccagggataaccgaaagacagttagagctcgaagtcgaaccccaagtcgtcggagtcggagtcatactccaagtcgtcgacgaaggtctagatctgtgggtagaagaaggagctttagcatttccccaagccgccgcagccgcacccccagccgccgcagccgcacccccagccgccgcagccgcacccccagccgccgcagccgcacccccagccgccggagccgcacccctagccgtcggagccgcaccccaagccgccggagaagatcaaggtctgtggtaagaagacgaagcttcagtatctcaccagtcagattaaggcgatcaagaacacccttaagaagaaggtttagcagatctcccatccgtcgtaaaagatccaggtcttctgaacgaggcagatcacccaaacgtctgacagatttgggtgagtcattttaaagtttaatgggatggtagtagaaaatgttttaaaccttwatttttttctgaccttgagtcaagtgaaatacttagttactggtttaggataaatgtttctgtctttaagtttttattattacatggtactgtatttaggaactactgggatcagtgtattataattagagttaaaaagtcctgtttcagagtataatagaaccaaggtgtttccatatttgaatgttttattttgttttagttatcttgccatagctaaaaattgaaagcagaaacagatgtagaactctagctaaattaaaaacaagctaagtatatgctcagattgttattgtatgtgttctaacatacatccttgcaactaagcctaaaattacaatgttcctttttaaataagttaacatatcttaaaatggcattataggactgttaaatgaaggtaattctgattggtatagttggtaatggaagtgagtggggaattttgcgtgtgggggttatttaattgggtaggtgatactagctaaataaagttaaatattttagatcagtgtgatttttaataacctgttctgctttactttaaagataactgttctaatttcccctgatttttagtgtgcagaggtgattaaaacttgatcgatatgaatgattacctataataaatatggataatttatccttatcccagtatactggacatttctaggccaggattgtctaaagaagaagaggttaagagtaaaaagggagaatctgcattcagttcaacagaagttttctgagttcttttttattcacagcagaggaacagtatgtaattcctcaagtgattgcaagtggtggaggagacatgggtaaaatgcatatatgtctctcttatagtaacactgtctaaaaaggacagaatgtgattactataatactgatagaggtgaggtactttaggaacacaatgggaaaaggggaaaaggaatgttaattctgacttaatgacagcttgttagaagaggtggcacttcggctgggcatggtggctcatacctgtaatcccagcactttgggaggccgaggcaggtggatcacctgaggtcaggagttcgagaccagcctggccaatgtggagaaaccccatctctactaaaaatacaaaaaattagatgggtgtggtggcacgcgcctgtagtcccagctactcgggaggctgagacaggagaatcacttgaacctgggaggtggaagttgcagtgagccaagatggcgccactgcactgcagcctgggcgacagagtgagactgtctcaaaaaaaaaaaaaaaaagaggtggcacttgaactggggctcaaagagtgatttaaggtgtcagaaggagagtaaggtcrtgataattttgtgaaatgaaataggctttggcaggtttatatcttagagtgwgtgtagtagggtgatcattatagttgtgtagtaacctattgtaatattctaatgggaagctcaatatgtggacttaattccctgaatgaggccactgctgaaaaactttgagccagtggtttgatcatagctgtaacttagagcagaatattgatgcctatagttttttcctttttttttttcttttttgttagatacccaagttcttcgatggatctaggatgcctttagttttgttagtatgttagacttttggtaatacaaaatgtacagycttttaggaaaactgcagcttgtatttttcttcttacagataaggctcaattacttgaaatagccaaagctaatgcagctgccatgtgtgctaaggctggtgtccctttaccaccaaacctaaagcctgcacctccacctactatagwwgagaaagttgctaaaaagtcaggaggagctactatagaagaactaactgaggtaagctagacagaatttgttttcattcttaaatggattattccagtgatgttgactctggagcgtgccaaaacccgaattgtgggcagaactgataatggctggcaccgagtggccaaaacccgaaatacagatgtggcagcggcagaagctctgtttagcaggccattatccgggatggctaagctccgctagctaaaagttacttcccattacttttgctttccagttttagaagccaaactgactgaggagtgggacggttcgtttgaatggaggaggtgttgagtgagcaacacgcagaagctcgcctacagtttcgtttccattcacgacgcgttcactgatcgccacgagtatactgcatatacgcaaagacacagacaatcttcagaaatgatcttttgccaccggagcttggaaattaataagaatagctggccattgcctgaaaggaacttctttcgcatcaacatttcgggttttggctgtttggtaccagccattggcgataatggccggccattatcagttcttcctgcggttcgggttttggcagtaacatatatattttaaacacacttatttttgtttttaaaagtttgatcttttcaattgaggcttttttggggctttgttttattactatttttttggtgtgggtggatggggggagatgctaaaatattgctgctaggatccagaaataccacactgtttcatatattggaacttgttattggctagccttatgccagcctgccactgtcaatatattctgttccccttggttacaagcttaatatactcttgtgtttttggcgaaatgagctttttatcctattgtaatattttcaattgataatagatgtcattaaatctactgcttgtatagagacaggtgtacccaaatttactcttgacctttttataaagccaggtaatggagtctgttcctttgcatctcaggaaggaattgactttgctttatgtatcagacctcatcaattgcaccctctccatcatgccttattttcctaagttctccttaaagaaactcaacccacaaaacatttatggagagacatgttgctatctaatcctgttgcaaatatttcagatcttttgttttgccatacatctgggaaaatgtaaagcttctgaatctgtttcctcacttagatttattacaatatgaattacaactttttttaaaaaattaaggaccttgtaaacgcttctattgcttatttacctaatccaagctccttatccaaaatgctaaggacagttagtattttgctgttttcggccccatcttcagccttcttgtcccaagtttcttctcacctttttaccaccacctgactaggatgacttctcctttccctaccagtctttgttctttactatgaaaatctggcttagaactcttcaaggaatattccttgattctctaactctgcctgactattctctcttaagcctttgttcttttagcacttatgtactcagtttgtattatatcagtttgcacttgttattgtgttgctctgtaaaagtgttcaattatttcatgtatatgtattccttctcttgtactagattgtaagctccttgagagcagggaccatgtcttctactttttttttttttttttttttttgtattccccagacagtgcccagtacagtgctctctctgcacatagtaggtgctcaataaatgttgttgactgactgaccagccagagtgtgtttaaatagtagttaatatgccaagttacgtatctataacctatcatgaatcttgtttaactttggaaagttgctattatgtggttttgattctaagaaattacatgttctacataaagcgtaagatttatcttttgtttgtttttacttttaaagaaatgtaaacagatcgcacagagtaaagaagatgatgatgtaatagtgaataaacctcatgtttcggatgaagaggaagaagaacctcctttttatcatcatccctttaaactcagtgaacccaaacctatttttttcaatctgaatgtgagtattagtgcttatggattggtaaaacagtgtaacttgtggaactatttaaataaaacccaaatcgaatttagtttattaatttttgttttaaatactgtgagaaataatggataatatcatttccttcagattatgtagaaaatctcaaaccatttaatgtagatatcatattgagctttaattaagaaacactttattttttagattgctgcagcaaaaccaactccaccaaaaagccaggtaacattaacaaaagaattccctgtatcatctggatctcaacatcggaaaaaagaagcggatagtgtttatggagaatgrgttcctgtggagaaaaatggtgaagaaaacaaagatgatgataatgttttcagcagcaatttgccctcagaggtaagtaggaggaatattatgtatttttccttttttatacctgaatctgccatttcattgttatgttatgtctgatttggattctgtttcactcttcttagggccgggttaaacggcagggccgggttagacgacagatgaaacaacccgcagcttctcatttgacagtaactcgatgcaattcactttgtggaaccaagccacaaagtgaaaagcatcgaattgcagagaacagtgttatcacatccctacccaacattgggccctccctgcacttgtgggaaggtagtccaaggtacaactatttagcttcccgatttgcttcaaggctctatagctctagattttggtggtagcaaatttatcgggtggagggattgatcggagagggcagatcctcaggttcaacacaagaactggattggaaaaggtcattgtaggttgatgtgagcatcttgggtacatagcccattgcccttaatgatggtttcttactgtttctctgggttgtttgtcagatagcctttaattttaattatttttccttccctttgctaccttggcccttttaaattcttgtgtttaacctaatgctcagccttggtactccattcccttctccttcccctctttgctactattaaaagtcggagaagtggaattcaaacgttgaaatttccacggggctatagttgtatcttaataatgccaagtgtcaaaacaaccccattaaaatgccgcctgattaaataatgtgctgctaaatatagtgcacatgaaaacagcaagactgtatatatatgtaaatatatatatatatctgtatctttgtatgtatctctgtatctgtacctttgctgtatcttttaataaacagtttacttttatttaacttgttgtgcaaaatcacgcttgggggatgtgggagggtggagtcttaataggggggtgggagttttaattactatagattagttgtcatcgcctcttgcccttggtttccaaagcccagacttttgccaaggactggactaggtatctgatgcccatctggacatttttcttgcagttcttggatatgtagatcagagacacctgtactcttcactgtaggttcccttccttggcttggccatatcatcatcttccagtaaacacctccaattctacaaataaatcctgtttataaaatcagaaagtgaacagaacccaaatcagaaactttttgatagcagtacttttctccccaagctattcacagctgacattttcactttttttttgtttgtttgacctgcagcattttgagagaacaagttctgtacaatgaagctggacatgataactagccagtgcaacttacagttactggtgataatctgtattcccatgggattcaacaagtgaagcaagttatgccatcaccagttaagagggagatagttggtttggataatattttagtgagaccatttgagttgttaatcccccaatcaggctacctgcatatctcaagagagaaaggttaactgacatgtgcagctgacttaatcttcttgtagtagctgaatagaaaccatgataagagggttgaacaggcttacttagaaatcctaatatgtatgcttttagtaatttcctgcagtttaagcatttaaaaaagagttggaaaaaaaaataggtagggagagagtctgtatgacaaatattttccactgaagacttaacaaatattgcagaattccaagggatcttcctgagaagataagtgagcataactgttttgaatttcttcggttcaatcatggggaaagtgcttagtaactcctgatgcttacacttttttgagagagagagagtgtgtgtgtgcgtctatttatttgaaatttagtactcagccattttcaatcttaacactgagtgtggtgccttagccttgtttgtcatcaaaagttgtcagattttaattaaaggttgaggagaattattcttaaatctggtgggaaaagttgatagagaaaggtactcaaataatggtgacattattttttgttaaaaaaattttttttcttaccaaagaagaatcctagaaggtaaaattattttacaattcttttcaaagggctaaatgaataaagcagatgatgtctcttgtgggacgatatatgtaactatttgatataaaacctctttaagctgcttagaagattagactcaaaagaacatacagattaattctaaagaagagaatcccaaaatacaagggcaaagaggcaggattgccttttgctttcatatctgcacttttacctggcaataatgttaaaatgtgtagaggaaatagtcacaatttaaaatgtttagttccagttatttagtgaccatctaaatatactatattgtatatatagaaggtaaaagtaatgaatttattatttatacaattagtgttatatataccaatgttgtgaaatacttttggtaacacttcgtgggagcattaacccttttgattccttgttagagtttgaaataaaggcttctagagtaaaaggagatagttcttttaaatggtcaacctttgaactgaatagtaatttttatctatgcctttttcattttaataaatataaatggagtttgtggttctttgttgttgagcataaaacatttaggcaaagatcacagattttatctccataagagggctgaattagctttgctgtaatccctaatcccaccaattgtcttgcatatgaatgctctttgacatgagtatgaatggatagacattgtggatgaagcagcataaattcatttcttatggaaaaacaactcatcagactgtgtgcggtactgccatagcatcgtcttcatactcagaaaccagccagcatcatcctcagtaaggagtgactacagaactttgactgtatttgtgtgaatttgatttataaacaatgaaataaaatgttggaaaactaatattttaaaaatagtcctcaggggcattaattcttggtaataaagttagtagaggtttattgagtagaagattaggatgtaatctttgacataagtggagtagtaactactcaactattagtgtggagttttcatggatttagtatcaatcaaatgttttaggggtccagaggtagtattgttaaggtctagtgaatgcttagatgttaagatcatctttatgttaagcagtttactggtttgtatttatcaaatcatatttccacatcccaatggaattacaatttttttaaatttataagctctaaatgtataggaaaacttggagaaaaatgaaaattttaattggaaattaaacacataggtcccggcactgctagaatgtgtaatatacagccttgttattctttccttcctagattctcttatgtggttaacgctgaatttctctgaaccatttagtaggttatctatttgttttcccgttgtacttcatttagtctattatacactagagaattttgtatgatacaataaaaagattcgtaattcactttttaaagccaaccaaacacataactgggacattctgtggcttttatttttgtagttgtcattttgctcttgtatgcattaacctctttatattttaatatttgctaaatattctaaaatcatgttttatatacaggccagatgcttttaccttaggtctattttcttataattaaagttttccttttatgcctgcttttgagatatctgtgattaccaataatagaaaataattttctggttataggtattttccttatctgactcaccccatcctaacaattatctttagctcttttatatcctttcactgatattctaagaagtctcttaaaatattgttctttttatgtcaacagttgtgttaacaaaaggagtaaatggatttagaagaatttcctaaatgagaaataaaaatgtaaaaggctcacttaaatgtattaatataggtcatgaaatgcatgttatatggtgccagttgcattatggtaatttcattatgcctcagacacctttgtaggttttataagaagtagttgtctgctttcttgctgagggagagagagtgaagaatttgggcagtttttatttacctgagatttgtaattcaggacactttttatgtaaatttcaccttttagagcaaaggtgaaaagtcagtaaacatttcccccattatcatacctagaatattactacagaattatttttatacactaggtaacatgctagtcttatagtgtattggtagaaactaaggcttgttggtgacagcttggtaatagtattctacagattaaagattctctttttcccagtttttggaggggccttttaccatcattttggtgcctttcttatatttccagtttctgaatattaaacgacagttaagattctaaagctctattgtccaatacagcagttaccagcccctgaaaaatcaggtttttaatcacactagttacatttcaagtgctcagtagtgatcactgtaagaagttgtactgggcaatgctgctctaaagggtagctgtggtattatgagtgtttcaatactgataagtaacatcgggtttgacccttaaacattgctgctttggggattgtattggctttttatgcctcattgtataacttgagttaccttgaaaggctggaaacaggctttttgatgtaaacttttgaggatctttatgaggttaagataatcttgattcattctactttgagtatatgttttcgcattaaaaataaaaatatggccaggcacagtggctcacgcctgtaatcccagaaatttgggaggccaaggcgggcggatcacctgaggtcaggagttcaagaccagcctgaccaacatggagaaaccgcgtctctcctaaaaatacaaaattagccgggggtggcagcgcatgcctgtaatcccagctactcaggaggctgaggcaggagaatcacttgaacccaggaggcgagaggttgcagtgagccaagactgtgccattgcactccagcttgggcaataagggcgaaactccatctcaaaaaaaaaaaaaaaaaaaatgaaaccagtagtcaaattactatttggtaatacatttttgacatgaacttgcagctcccttggtaagtctgttgaagagtaaatgaagttttactacctcaggaaaaacatagttgtaattttatttaaatatcaaggttgctataataaaattcctttcagaatcatgagtttaatatgaaacactaagatttgaagagtttcattctggggataaatggtgaggcatttaggttaaacgtttaataaaggctaagagagaagaacattcgcaggtgtaatagtttgctttccacttggaaagaattagttttattctagaagttatattttagagccatctgaatagatgagtagctaatttatagttggaaattagggatcaggagttgggatagtgggtagacacattttccccagtatcctcagattttagccttgttagaataaaagcctattatttatgcctaagcaccctaacacttagatttatagagactgctaggaaaagcaaagtaagtgtgagaaggttaatgagacagtacttgtcgcatcttgtgtgccttcaaaaattaccttgataatcctacctgacaaaacatyttaaggtaggcctagggggacatgaattttcacytgaaatatctgcattctcattaaagtcccaggaatcaaacagacttaagtgaaagatgacatactaagtttcttagtgtttcaatctcactttgcttagattaatatttctaataggtcttagaattgttctaatttgtgtgatgatttacttaaatcaacttagcgaaattacagttgagagattcaatttgaaagatgcattctgcagttgattagactgtttatagatctctagaaagatttatatattaacataaacagtcttaattacagaaaggattaattttgttttcattttaagaaggcattgtatcagaatccatacttaaagaaaaaccttgagttagctaaaggaatattagtttattagcaaggtaactaagaattatggaggattaggggttctgaaggtaagaaagatttgtgaatccttatgcatgagttataattattctcatagtcatacagccttctctactagacaggtcttattcttaagagaagtcttttatacatgatacatagtcttaattacagctagcctctacttgtaaaaaagaaaatccttagccgttagctatttactgacttccccgtatttgttatgttcatgcagtgtctacttattctttgtatatgaaaacagcaaaatcttccatgtcagataagcattttacaaaaatgaattttcttgtgtgagataactaggaaataataataatgttaaaagaaggacaaaaaccaagaaatgagttgataaaaatcaactcgagcttttaattttagaacaaaaaaaataacaaatacttatcttgatgtgtttttcattctgtggttaaaccttccacaaatctgacaaattaagaattggctccaaagattactttgaaaaaaaaagtttcttccacttgccgtaaggttttaaaaggtagaatatgagctttgaaaagaaacaaaagtgtttcagttgatgttatggacttccacagaaatattgtaattataaatagtgtaatawacttaatataagtaataagtgtgtataaactgaaaacatggttcatttatttatatcctgaatatattgtttaaagaaattgggttcttaagaccaaagtgtccacaactggaagatgttaaagatacgctgatgagtaaaggagtgatcatagtggttttctgcttgcttgttcagtaattttgcttactgctcttgaaggttatgctaatgagtaaaatgaaaactgctaaggaatgtaataaccttaccacagttcaaaaaatttgcagtttactataaatggctttcaatcatgaagagtagcgagttttaagttcttaatggaactttctatgattatagtttgatatatatatataatagaaaattgactaaattcagtcagattttgggttcagttctgcgacctgtgtgatactttgtaatttatcttaatcctcttctgttttccaagattactttctctttctgagtcttctccctgttttccaagattattagtattataagactattattttgtttttgatatgtagcaactraagatatgagtacttttcagaatttaggggactatggtaatttgagataattatctctgttttctttcttagcctgtggacatctctacagcaatgagtgaacgggcacttgctcagaaaagactcagtgagaatgcatttgatcttgaagccatgagcatgttaaatagagctcaggaaagggtatgtagcagttttttaaaaaaaattattatttaccatcagccaactcacaccaatgtaccagttttaatgtctaaataagaattttgctaactagatggttgagttgtaacatcctttaccttattttcaatgtcttattttaaatgaaagtgattcgaggcctgatcatttattcaataaatgtttattgtttactatgtggcaggaactgtttcttgagagaacaaaatagaaaaatttccctgtcctcacagagtttacaatctggtgtataaaaacaactaagtgcctacaaccctatgaaatgtgtaggtattaatagttgccatatttcagccgagaaaactgaagtaaagggtggttaaggccaggcatggtcgctgatgcctgtaatcccagcactttgggaggccgaggtgggggcaaggagtcaggagttcaagaccagcctggccaaggtgatgaaaccccatctctactaaaaatacaaaaattagctgggtttggtgttgcatgcctgtaatgccagctactcaggaggctgaggcaggagaaatgcttgaacctgggaggcagaggttgcagtgagccaggatcgcgccactgtactccagcctgggcaacagagtgagactgtctaaaaaaaacaaaagagtgattaagtgatatccatagtcacacaactaattagtgggggaactgggattcaaacccaagcaatctgaatctggagtctgtgcttttaacaatggacagcctctccatttcatttctactgttttatggtaaatcagtaagtacatgttcagacaggaaatacattgctgacagtgcaaggtgtttagtaaatctaatttgtgtgaatgacagctgatctttatcacaacaaaygttggtgactgaaaaaaagtatacaagcttctttaaaaagttgttttacggccgggtgcagtggctcacgcctgttatcccagcactttgaaaggccgaggcgggcggatcagttgaggtcaggagttcaagaccagcctgactaacatggagaaaccctgtctcgactaaaaatacaaaattagccgggcgcggtggygcatgtttgtaatcaatcccagctactctggaggctgaggcaggagaatcgcttgaactcgggaggaggaggttgcagtgagcagacatcgcaccattgcactccagcctgggcaacaagagagaaactccatctcaaaaaaaaatagtcgtttatgtattcaagtggacagtttcctacatttaaactctttaaacctgtgtcatgaatttagtctgtataaatgtctcaaaggaagtaattaagaatccaggctgtcatgacatgtattacaatacatttgtatgagataggaagggagggtggggacccattgtcatatgagctcttttttgcatttttagtgtatctgtgtgatagtttgaagaatattaacagctgtattttttagtagctrtgcttttagatacatttcaaaatcttattaatgggattcactaaatgttgtcaaactgcttctttagaaagtttaggcaaacatttaatgttaaatatgttttaaaagttaaatatttaagtctgcttttcagccatttttagtgaattattaccagtgatgttttaatcaggtaattttacttagttaaytgagactacttcttttcttcagattgatgcctgggctcagctgaactctattcctggccagttcacaggaagtacaggagtacaggttttgacacaagaacagttggccaatactggtgcccaagcctggattaaaaaggtacacagtatatgcacatatgaaagtgtcgaacaaaaagtttaaattttttggaaactgtttattaaaactgcatgaaaagaccagtgactctaaccaaagttccaagtaaatttgctatgtgtatatgctccagggcggacactgaagacggactggattcatgagaaaatggcaaatgtataaatgtggctcaagagccactaacttataaggttattttaaaaattgttactgctgcttttgaaggggtgatttaactttattttgaacgctaatagtgtatcaggtgctgttcagaatattccacagttcctgctggactactaacctaatcatttcaaagcagtggttctcaaatttttcttcatcatgggatactttattacaggtttatttttagtggatcactgcccccaagagccctctaccaccttaattttccattcctctattcctttgccctcgcaccccacccgcttcattagtgcctgtgccttcttgtaagatctcttggcccccgttcctcactcctcttgtgacctgtagccccaggaccttttggttgtcagctgctggttacagcaagtggttgggaggccctagtattagctctgcatgtggtgatcttgccatgggactggaagcctgagggaggatggctggagtggggtgggctgtggtgaaggggatgggatggagattaatctgtggaccaccatttaggccctagtggcctctggtgatccacaggctcaatttgagaaccactaatttcatgacaaaacagatatgtaagacctaaaatcaagggagagaatggacgcctcgtgctacgaagatgtaggtgcatctggtttcagattctgcagtgagacctgtgaactccacctacggctgcctcatcattgggggagtcttaggtggctaagaagggcattctgaagaaacgcgttgtggtgaagggacaaagcttggttggatgggtgatgggaaatttgttacaggagtactggcagcatagcagtgctgaaactgggaggccgcgtggtctaatggattgggaaggtttctttatcctgttgtactcctgactccttgtgtaatcatgggcaagtaactctttggaatttcaaagtctctgaggtgtctagtggtaatcagtaacgtgatggttacctatagagagttgctatgagtgccagtgaatgagctgaatttctgaaaaatgagacattggttgctttgtgtattttaatcttgtaacatttatttcaattttgatagctttatctttgttgatcttactaacaaattaatatgaaacatcatgtatactcattatgcctgcctttttttgggaagtagttgcactgatgtgtatagtgagtacacagttagattcattaagaaattacaatttctgcagtttgctgagggttggtgttagaataaagggtgaaaatgtatatagcaaaatattttaaagattggattaatcttggacttctatattatagttactatgaaagtgatttatataatatttgaaaaaatgtctttcatctttggaagaactataaatgtacatctatttctttagttttaattctttaatactatttagtcttgaagctaagtactcagccagtatttcaggaagttagaaataaagcttatgggtgttaaaataggcacataatacagagtcatgtacactgctaggtagaaacttctgaatgtgcttccattacaaaattttggtctttatctaatgatgtgctgatccataatgtttgtatacttmtaaatgtgttaataacttaaataacttttaaaaagtgaatcttttactgactcaattggttttcccctaaaataatttcttctggtatttgcagtcttgtaggcagttaacagactttadtaactttaaaatgtttagtagcaccttgaaaaaaggcttcaactttatattttatgtaagatatactttgggaagcaaattattttgataaattatgagataaagatatgttcagaccaaattttaaattatagataaaagtagcacttaaaggaaaagattcatttgtatagaattactgaagaatatttgatgctagtatcaactaaaaaagaaacttttkaaaattaaaaatgggccacaacatgtagaagtcattaggcagctgaaaatttaggatgtatgatccatgttaaatatcacaaatattgtctactcattaaatgtttagttgtgtttagaaaacctgtcaaacgatcattttggctcttctttagtatagtccagcatctgccttatgtgttaaaaaacacatggaataccaacatcctccgtgttctttttagtttgttgcagtgtatttttagattacaaaaaaagcaaagttttatcagtagtctcattaatcagtaaaacatttaaagtagttcgtttaaaagaaattttatttctagaatggaatgatttggatgtgacctgataaatacagtttgttattgtggtctcattaaattaatcagctttttcacactggggtaaagaaacagatgatgatactagggaatggaaacaaaattggaaacctgggttatttggggatttatattgtactctgcacagttgcccttttttttaggcgtgttccctggaaaagagggacggatgaacctggaagtaagtaaaagacattctaggtgtgtagcatcaaggcagttaatatccaagcatcagctttctctttatacatctacactgcatggcctgcaccaaataaggaactgaaccaggggtatgtttttacctccacagctgcctccttccatcagagcaccttgatgaacttaatgtctagtcacacgtcattggcatgttttctccccagcatttaattacaaagctgggaaacaaaagatgatagatacagttttactactgcatacaaacatttcttttttacattcagtattaacttatcaatataggagatgtgcatactatttcctgagctactgaagtttttttactctctctgttgataagttaatgacttttgctatattatatatttatatatatatatatatatatatttggtaagagaacataaaaacctaaaatttagtaacaaggggaaaataaagcatgatttggagatatgtttcaaatttttaaaaaatgaccataaagatcaacagtacaacttaatactgtttgctatatgtacatggatgccctttaataagaggcattgaatatttcttaacctgtaaaaataactgttgaccatgctaatgtatatatacttgtgcatcttaggacattaagtggtttgctgctttgatggaaattatggttcagtgggttggatacaagagagatgactgttcacagaataacctgtgaactttcacccctctgtatggaaacttgtttcagggccaaatccttgtagctgtcttcttgccccggtcagtgccagccgtactattcacaacactgctgctaccgaggcctaggtatgtaaacatttaaggagttttttaaaagtcttttaacatcaagctaggttttaaaagaattcaaattcattttggcatacttacaggatattttatgtgattgttttctatttgttactgtgtaaatttcaagagtttttttttttttttctgctttagggattttctaagtaaaatatttatacttgctttatagtagaatggggaagaaaactttggatgacaacagtatgcttcttcagtgtctaaactatttctaagtgatttctgggctttattcataaactaggtacacctgggacaattaatatcattgattgttttaacattgccttctttttattttgcaagctaagaagagataccagtgaacctaaatagtggacgaaaacaggagtgttctaattttttttttttgaggggggcacgagggctactgtttcaaaactgccatttacttgtcttatttgacttccaaaatactattacgttaatgtgcaaataatcagaacatacacactacagtatgtataaagtatagaggaatttacatttaattgctataacagatctagaagtaaagtaagattcctctttttagaaagtaaacaatgaatctgtcaccaagttctaactgtaaaatggggacattttacctttctttctttggataggatcagttcttaagagcagccccggtaactggaggaatgggagccgttttgatgagaaaaatgggctggagagaaggagaaggattaggaaaaaacaaagaaggcaayaaggaacccatcctagttgattttaagacagaccgaaaaggtaacaagttcttttttggaatgtttattaacgtctcctttaacattacctttaatatatccttttgaacccagtgatactgaactgaaggcacttcttgtatatatacaggtatttgtcagaaaaaacattaaccccttttggggttcacagagcagcttatttttatataactatggatagagacaccagtttgaacttttaaaaggcaccttttgttatgctagttgctaaatatggaaatgtgtatatatctaattttattattacacctccaaattcaactggatttcatgtttagaaaacaggatttccattttattttctcttgacaaggaaccatccttttttctagagtttagtttattttttgttagatattttagcacatcttcattatttcctattacaatactggtttagtctagatttcataaaccctgtttgcttttttcttccaagctcagtagttaagttgggttagagtatagtagaccagctgctgacaataatgttacttcttcctgttgccttgtgttaaggcatcttggaactgttagcattgactgtattttccttttaccttcagatacctgggcagggcagcactgtgtcttctatgtagcttgtatgtagttgctaagtatttaatcattcccacagatgatagctaattggcgtcttttaaataacttcttcccttggaataatgtaagtggaatcatgagaggcttgccagctcagtatgatttttgtatagcttgtttaaacctcatttataaaagctgacaaatgtaaaactgggatttattttcatctttgtaatcaaacagtaagttgaagctaacttcaatagttaaactgtcttaatgaatttggaaatgaactagctctgcaccaaatactttgatgttaagtattgtacaatttcaggaagcattgtccttggaattgtgggacatggcctgactgtaagctctcagagaaccacagatttcccaggataggtttagaaaagcttatattagcatggaattatttagcaaaggttgaaaaatttcctgtaacatacaggatgagcatcccacatctggaaacctgaaatgctttaaaacagaaaactttttgaatactgatatgatgctcaaaggaaatactcattggtgcattttggatttcagcctcttcagatttgggatgcttgaccgctaaatacaatgcaaatatttgaaaacctggaatcaaccgacacacttctggtcccaagcattttggataaggaatactcaacctgtatatgaattgggaaagcagtgtttgggtttagcaatgtagctaatcccctttgtaataagtctatggagagagaggttatgtagaaaggttatgttcatattttgagaacatctcccatttgttaggaagggagaggagagtttgctaggaaaaaagggacctattttatttggagacaaccgttttcacctttttggtggcttaaaatcctaaccttttttggaagagtcttaactgaagcttatttttttaagagacagtaaatctgcagaaatcacttggcaataagctattttttttctttttttgagatggagttttgctcgttgcccaggctgtcagtggcacgatctttactcactgcaaccttcgcttccaggttcaagcgattctcctgccccagcctcccgagtagctgggattacaggcgcgcaccaccacgcccggctaatttttgtttctttagtagagacggggtttcaccatgttggccaggctggtctcagactcttgacctcaggagatccacccgcctcggcctcccaaagtgctgggattacaggcatgagccactgtgcctggccatacttaactttttgttttctgtttacatttggtatttattacaatttctcataccaagatctatgaatattaaatataaatttatatgctgaaaaacagtaaaagagaagaaagagaagattgatagagaaatcgagtgtactaggaatctgctgattttatttgaaggcatacattttgaggttcagactcctacagagggatctttgttttmaagtggtgctttgaaatttatttagtgaacaatttttttttaaaggtcttgttgcagtaggagaaagagcacaaaagaggtctgggaacttctctgctgcaatgaaagatctgtcaggtgagagcacgtttttgaatttcctcttaccctaatcccaccttgaattcattatttgttgcagaagttggtggaaataatttaaaactgggtatttctcccccctgcaggcaaacatcctgtgtctgctttgatggagatctgtaataaaagaaggtggcaaccacctgaatttctattggtccatgatagtggccctgatcatcgcaaacattttctctttagggtaaatatgaatttctgcattaattatatatatttattaatgtgatgacttagagggtgaggggtaaacatgatcacaggattaagattctgttcatgggtggggggtttgtatttgtagttaagtggtggggtttttaaacactgaagggtgctttaatacgacttgtcaatgtcctattttttaaaaaattggaaaagggtaaaatatagtatacaattgttattttctagttgaatgtggggaattaatttaatacttttgtcagtctttttctcaatttggagacctgctctaatttgcagtccctttcccaaatgatttggttcttcgggttgagattataatttgacttacatagtatgggttttatatttttgtaaattatttttctagcatttagtgaaaaaatacaaagctaatagatattaaagtttgatgctgttcttattgtatgtttttcttgaataggtattgagaaatggagcccttaccagacccaattgtatgtttttcttgaataggtattgataaatggaagcgcttaccagcccagctttgccagccctaataagaagcatgctaaagccacagcagctactgtggttcttcaagcaatgggccttgtaccaaaggacctcatggctaatgccacttgcttcaggagtgcctcacgtagatagattgaggttttataataatcatttcagaattttactctgcatcacaatgtatttcctctttaatgttgtaaatatttggcaatttaagacattgtgtaaaaagcaatctgtaaaaacatctccaggctttgatttttgtaccatggaaattgtatttaaccatacagggttttggtatgtttatattgtttaccttagtgatgtatttgtttaagtggctaacatccaaacgactgtttgaaggcatcagagtaatcttcagtgtggaatgttaaataacgcttttatactgtattttgtactatgatgtaactccccttccttatggctaggctactgtaacacttgcctgtaatcagtgaagggctgtgcaccttgtactatttcacaatgggttctgctggacagataatgggccagtgttattgaggtgatcaagatctgttccacagggctaatgccaccatctcccctcaaaattttgtagaggytctaaaaagaaagtggtatgttgtgtgatgatcagcactaagtcctgcattcctgttaaagccacttgggtcataagaagggagtaaaaaatgaagtctgactagaattctattgcagaggccagtacatttagtatggcattgagttgtgatatagttttactttgatgtgcattttgaatttcagctacacctagatagacgtaaaatgataattaaaatgctgtaaccaacttatctaataaaattggcaaccagccactattttgttgactatgagaaagttaaaagtttatgttaatttttagggtctgatagaatatttcatgtgtattacagtggtattcatatgctatgtctctaaactttattttcaaaagcttaaggcccaaatacaaacttctctggaawaaacgtggtgttttattttctgggttataaagtgaacaaatacttagatactattatttctttacccaatgcttttgatttttaagcacttttattttaaaaatgtgaattatacagtccccccctacacayacayacacayacacacacacacacacacacacacacacacacacacacacacacacacacacacacacacacacacacacacacacacacacccctataagcacattaaatactactttgccgtgacagctcagtgtacttcacaattcttaacactattctatgtggaatacaaaatgcctttttatctgaattaacatgcatttaaaaagttttagtatatgtgaaaataaaggaattataaatcagtaggaaagatattaaggtagaagcatcaccaatcaactagctcagtagatgttgtctgtatttattttctacctttatgaaacaagaacctgctaacaggtaaatcgtaaagtaacatatttttgccctgatgccattagtcacaatgccatggggtaactgctatgtgatttcccatttgcaaggaagcatattaattcagtttctgctcaatatacaattaggttgtagggatataratatctcatttgagttatctgagtttttcatctttatatctaaaaatctaatctgaaaatagtaaaacacatttaaaaccttagatgctactgtagtaaaagttatgtttataaacatttcagtatattccttcaacttcaagaatcttgaatttccttgctagaaggcttttttcctcaaagattccttttaggcttactttggtgttcaggatctccaattataaatgtagtctctcagcaccacattccgtaaagatgatttcccaagtaacggtatttgactaagttgctccagagtgttagggtgcaaaccacagttagtaagctccttatgaacaacctcctgtggaaatgtgtgtacaagtcagtaaaaagcacattagtctttaaacacagaagagttaaataattactatggagactgacaaataaatggctgattaatgtgattcatcctattaatagaagttgatgctaagaatttttgtagtgacaaaatcccaaaatattaatggttataagtctagccaactgagatgcatgagacaattttaaaggtcttaattctaactctaaaaaccttaagtatgttcaaaattaaaggcaaatatggttaaatacccacagtgaattgtttccttaaactataaaggaatcaggtactattgagttttggatgcaagaggaaatgaaaaagctgcccctttttggaatgggaagttcttcagtcactgttaaaactatttggactgaggccgggtgccgtggctcaagcctgtaatcccaacattttgggaggccaaggtgggcagatcacctgaagtcaggagttcaagaccagcctggccaacatggtgaaacccccgtctctaataaagatacaaaaaatagccagatgtggtggcacatgcctgtaatctcagctacttgggaggctgaggcaggagaactgtttgaacccaggaggctaaggctgcagtgagccgagactcgcgccgctgcactccagcccgggcaacagcaagactccatctcaaaaaaaaaaaaaaattgtacttggactgaattcatgaaagctacctcacataaacaacttacagacattattccttcctctagtaattcataattaagtaacagtttaattacttgaaacacaatagtgactcagcataaatgactcaatttccctccagctagtttgaggaaactacaactaaaacagtctgctcataggtgtctacttaccatatcaagtactttgtccatttgcaggcagatgttaaatacagcagttggctcgtgtggatacagtactgcagagaaagatccactctgtgaagatttgagcagcatggtcagtgaatgcagagaatgaggcatgataggacctgtaatctccaaactaaattggtctctgtatccagaaagagcttgtgtcttcacattcacactccgtgccttcatgaaaatgtaaagaaaaggaaaattaagatcatctctcaaccttttgcctagccaaaaatatgttcaatatatttccatttggggtttcctctcttttaacaattatggaataaaactatttcccaagacatctaaacaatgttatgtgagtacaaatacttagtaaattttcagcaacctttccatattaagagattttcaggtgaagtatattccagagaataccattttttcatatagtattttatctgatttagtaatacactgtcaatgcagactattggaaaaacaaaaatttaaaatccattcaattttattgctaagatttagcatgtattttgtatttacatatataatttattatgattataatcccagcactttgggaggccaaggtgggcagatcacttgaggtcaggagttcaagaccagcctggccaacatggtgaaacctcgtctctattaaaaatacaaaaaaattagccaggcatggtggtgtgagcctatagtcccagctacttgggaagctaaggcagaagaatcacctgagccccagaggcagaggttgaagaatcgcttgagcccgttaggcagagtttgcagtgagccaaaattgagccactgctctccagcctgggtgacagagcaagactccgtctctaaatagatagatgaatgaatgaatgaatgaatgaatgaatgcagggcggccaggtgcagtggctcatgcctgtaatcccagcactttgggaggccgagggcagatcatgaggtcaggagttcgagaccaccctgaccaacatggtgaaaacccgtctctacaaaaaatacaaaaaaaaaaaaaaattagccaggcgtggtggcacacgcctgggtgagagtgagattccccctcaaaaaaaaaaaaaaaaaaaaaaaaaaagcagggcatggcagtcctgtggtccgatactcgagaggctgaggcaggaatttcacttgagcccacatggttgaggctgcagtgagctgtgccactgcactacagcaagaccctgtctccccaaccaaaaaaagaaaataaatgttcgtataatttaaaaagaggccaggagttcaagaccagcctggccaatatggtgaaactccgtctatactaaaaatacaaaaattagctgggcgtggtggtgcccacctgtaaccccagctactcgagaggctgaggcagaagaatcgcttgaaccccagagttggaggctgcagtgagccgagatcgcaccactgcactgcagccggtgacagagtgggactccctcttaaaacaaacaaacaaaaacaaacaagaaaaaaaaaaacaaaaaaaatagctaggcttggtggtgtgtgcttgtaatcccagctactcaagaggctgaggcatggcgcgagaatcacttgaacccgggaggcaggggttgcagtgagttgagatcacgccactgcactccattcagcctggatagcagcgcaagactccatctcgaaaagaaaataaaaaggatttcatataatttatatatttccacataatttctttgatataactgtcttatataatttttgtttctttttttaatgggaggaaagcaaaatgaaaatatgtaccaagtaaaaatgctaggaggtttttttttaaatcaagaatttatcctatcaaagtaaagtacttcttaaaagctaggttatgcagacttttattaccttaagcatttgcattgtggcacctcggaaagcaacaggggacaagagggttggaggaagtcctgcctgtggacctgaggtagcaactaaactcttagagttaatcaaaaaattgagcaatgtaaaggtgttgattccttttaccaacacaacagattcaggtctgtgatccatttgtacttcatgtttctctttacgcctgaagatgacaatcaaggaaattgcaaaagcaaatctcacctaatgtggaaagcagttatcttgattctgaatcacctgagactccttttctccataatgaaatggaaatcctcttgctacctctctttaccgaatcataaggcatatgtttcaatcaaaatgttaacaatctgaatttgctacaaactgacacctaaacctaatttcttctctagtcaaaacacacctattctcccacaatcataattgaacgttttgattaaaaaaggtttaatagttcaccatttgttgatacttaggggcttatttagtattacaatggagaattagttttaatatgacctgaagataatttaagattataatcatataaaactgccaatgttaaacttctcactaacgtcattcaatgaaaattaattctagttaacaacaactgaaaggatacagcttgatagaaagtatgtctggctttttaattttatcttgcacacccatctcttccagccaggaaaaactttcctcttcatcctcatcactgatggcttgctccctaggaaattgctacagttagagtccctatttcacaagctgttcctgtgcaaatctatttcatgagtccataagtcagtggatgatataaagttattttaatcacatactccccatatcccaagcttgttccagatgctgtctccttcttatggccactttcttttattaaaggcagagaaaattcaatacctatatgaggaacaaaaatgtaactgagttgtcatttaaagtatttaacaggcatgctgtacttttagagtgtaaaaaatttgaaatgttagtttttacaaatgatctattaaggcagtagagttttcaagctttcttcacaaacctacaaacatgcataaaacgtattctccttgaaagaggttcgggaaacaacacatacatgtaacactctttcataaatcatattgtattccagttcactttttgaaaaagtactgattgggcccattaagtagatttcatgatccactaatgggtttactcagtttgaaaattttgttattaaaggggtaattggtactatagaagaatttctagaagagtatattcagatagtgactatctggcccaatatgtgttttattttagagatcagagaacactatgtggaaggaacagtttaaatcaggagtccccaacccctggactgtggactggtactggcctgtggcctgttagaaaccgggctgcacagcaggaggtgagcgactgtcgagtgaacattactgcctgagctccatctcctgtcacatcagtggtcgcattagattctcacaggggcacgaatcctactgtgaactgtgcatgtgaggcatctaggttgtgccctccttataagaatgatgatcttgtccgggcgcggtggctcacgcctgtaagcccagcactttgggaggccgaggcgggcggatcacgaggtcaggagatcgagatcgtcctggctaacacggtgaaaccccgtctctactaaaaatacaaaaaattagccgggcatggttgcaggcacctgtagtcccagctactcgggaggctgaggcaggagaatggcctgaacccaggaggcggagcttgcagtgagccgagattgcaccactgcattctagcctgggtgacagagcgagtctccatctcaaaaaaaaaaaaaaaaaaaaaaaaagaatgatcatctgatgtgtaacagtttcatcccgaaaccatcctcctcactgcccatgaaactgatccctagtgccaaaaagtttgcggactgctggattaaataattgtgggggagggaaaaaaagccagaaataaagaaataatatatttcttaatgttgctaatcaactggtaaaaggcattttaaatttaaatagcttttaggccaaaataggtttactatatagtatagtattctcactttaaacctaaacttttaccttcatttctcatagcttctcttaaacctcgagttgttggagatatgagagctgtgattaagtcacttccagctaatcctgctgctcggaacaggacagtaaactgataggtacaaacgtagaaataggggcaaagttttgtcttcagcaaattatatagagaagtaaagctcacagacctatgaagtaaaaaaattttcttaaggtattattaaacatttaatgcaatgtttataattctgaataattcagtttgatacctggtttaaaacacaacacaaatattttagataatggttttaatttttgtggttacgtatgacttagctttaaaggactgaaattggttatgaggactcgctgatgacttctcaatactttaacaaatagtgtataccacttaaacacttattttttctttaaacaaaacttaattgagaattgcctgctgactttctctgagctgctgctaaaaaaggaagcagagactgacaagaagtagcattaaagaattagggctgcgtgtttatatatatatatatatatatatatatatatactttttttttttttttgagacggagtttcgctctgtcgcccaggctggagtgcagtggcgcgatctcggctcactgcaagctctgcctcccaggttcatgcca

SEQ ID NO: 94559 - DNA, 29591 bp, Homo sapiens
  misc_feature (1)...(29591): n = A,T,C or G
gaatggatgttgttccctgaagttcctaccaacatgacatcttagggttctttttgtacttttttactccttcaatatctcggtaacattttttaccttaatttccctctgttaaaacaagtggtgtgttagcagttcctcaaaaggtcaaatagtgttatcatatgacccagcaattccacttctaggtatacaaccaagagaaataaaaacaaacatccaaacaaaaacatgtacatgaacatccatagcagcattattcataatagccgaaaagtaaatacaagccaaatgctgatcaaagaatacatgaataaacaaaatgggtcatatccatacaatggaatatcacttgctcataaaaatgaagttctgacatgttaaaacatgggtgaacctcgaaaacattatgctctgagagaagccagacataaaaggccacataaagtatgattccatttaatgaaatgtccagaataagcaaatccatagagacacaaagcagattagtgattgccgggagcttagaggagggggctgatgggtgactactaatgggcatggggtttcttttggttgtgattacattctggtattaaatggtggtgatagctgtacaaccttgtgaatatactaaaaatacctgaattgtatacttttttggtatgtcaattataacttggtaaaggtgtgcttttaaaaaaaggtgatatagtttctacctcctgacagagaatcgcgtaggcagaagacactgcacagtcatgcatgagcaatcgagtgaacagaggaacaaatgccaggatgaatggtggctgtaaccacccttctctcatatcttgtagttgtcaccccctcccaagcacaaacgcatacacacgtgtggaacccaagctcacagtgaagatgttagacactgaaaactacaaagctgctccctgccaggccagtctctgtgctcacctcctcttcccccacctccttcagggaaaggatacctaaattgtgactgatggtctcatggtccatttctccaaccagactaggctccatgaatgccaagtgtctttccctgctggaccaatagggcctggcatatggcaggcacttagtgaccttgcggggaaggaaagaaggatgggaaaggaagcctggtctaccccaagagaggagaagtcacatcaacctcaagctcatgcctttggggggctcagaggctgcagaagtctccaaatgcgtcacagcttctaggtcctcctccccaagacagggatattgagggcctaggcagacggagggagacactcagggcccaaggtcatgagctgtgatccctcatagattcccctatccctctggccaacccctggacccctgtggctcaccagtcttcaacatctgggtgaagtcctccaccagcgccatagcctcctcactgctctcagggcactggggctccacccagacacagatggcaggtggcaggacacccaggtacatcctgcagggccgtccctaattggtaccaccaccgtggagtacccaatgatagaaggggatgatggttctccataccagatcaagaatgattcagtgaaactaagtcagatcctgacctctgttggagccctcccaggccttcaagtaaaagccacagtcctcactgcctcctttgtaagactcaaagcctcctcctctactctgctcactcctgaccacatcttccagacagagcaaaggggctttttttgttttgtttgtttgttgagacagagtctcgctctgccgcccaggctggaatgcaatggcacagtcttggctcactgcaacctctgcctcccaggttcaagcaattctcctgcctcagcttcccaggtgctaggactactggtgtgtgccaccatgcccagctgatttttgtattttcagtagagacagggttttaccaatgttggccaagctggtctcaaactcctgacctcaagtgatccacctgtctcggcctcccaaagtgttgggattacaggcgtgagccactgtgccagctacaaagggacttttgttcctatggttcctttggcccagagcaggcactcttccctgttatctgcatggctttttcccctcaccttctgcagttcttttcaaacacaaccttatgagacagggccgtcccccaccgttatttatttatttattgtgcgtctgtctcaccttgtctcttttacactttgaaccatgtgaatgtaacacctggtcaaaacagtaaaaattttttttaaaaactgtgcttgtgaaaaacaggaacaggccaggcacagtggctcacgcctgtaatcccagcactttgggaggtggaggcaggcggatcacgaggtcaggagttccagaccagcctggccaacatggcgaaaccatgtctgtattaaaaatacaaaaattagccaggcatggtagtgggtgcctgtaatcccagctactcgggaggctgaggcaggagaattgcttgaaccagggaggcgaggcagaggctgcagcgagccaagattctgccactgcactccagcctgggcgacaagagcaagacttcgtctcaaaaaaaatagtaataataataatacaaaaattatccgggcatggtggcgtgcgcctgtaattccagctacttgggaggctgaggcaggagaatcgcttgaaccagggaggcagaggctgcagtgaggccagatcctgccattgcactccagcctgggcgacaagagcaagactccatctcaaaaaaataataataaataataataataataataataatcagttgggcatggtggcgtgtgcctgtaatcccagctactcggtggggctgaggcaggagaattggttgaacccgggaggcggaggttgcagtgagccgagattgcgccactgcactccagcctgggcgacagagcaagactcccatctcaaaaaaaaaaaaaaaaaaaagatagaagaaaggaagggaaggaaaggaaggaaggaaggaaggagggagggaaggaaagaaggaaaaaagacaggaacgaaggaaggaaaggaaggaagggaggaaaggaggaagggaggaaaggaggaagggagggaggaaggaagagagggaggaaggaagagaggaagagagggaggaaggaagggagggaagaagggagggagggagggagggagggagggagggaggaaggaaggaaaaaaggaacaaatgccgcctgaccgttctttgtggaatgactacacctatgatgagtacctccatggaccatgcacctgccttgaaacaaggaggcacagcacacagggccctcagctagagtgacagggaaaggcgggtggacatggggaaggctcaaactcaagctttgaaatcggggaaagccccgaaatctgaaccactcttgggcccatccttctctctcccacattcacaccttcgcctgcgctcccataattgcaaattaattcatccacacattcacacattctctccctcccactctcaacaggcagccccaagcccgggggcctcacgaagtctgggtggatgaccaagctcctccctcgagactacatttccaagacagaggagggaaggggaacgaacagcggacacgcgctgtgaggccgagaaggcccgcaagggaccttagggccgggcgaacacgcctccacgcagatctgggccaaagaactcctcgacccaggagggacccagactcagatcagcacctgcgcagtatggtcttaggcgggtaccgtcccgtgtagcgggtctacatttcccagagagccgtggggccgccgaaggctccgattggcccactcgggtgcgtgccagctgcggacacagtggcctcatatcccagttccccgaccgaaccaagaggaggggctgcagctcctgccccgaagccggggccccagcgcggccgatcaacctcaccttcgggtcgcagtgcgagccgtctgctttagctgggctggcggggcttcggcccttccccatcgccccgcctcacagtgcagttttccggaggacgccgagcccagggtccatctcggccgcgaagggggaaggttgcctggcgacggccgggcagggaggaggctgcgtcaggcccgccccttgcgacgctctccgctctgcgcccggcgtcccgggtactgccggaaaatgtagtttggcaacgaggccgcaccgcacagagtccagccaggggcgccagaagctgcttctgaccaaaggctggctttctcgccgcctaatgtctttgtcttacatcaccctcccttcctccttcctttcctgggtatgtgtcactattttctttttttttttttttttttttttttttgagacggagtctcgctctgtcgcccaggctggagtgcagtggcgggatctcggctcactgcaagctccgcctcccgggttcacgccattctcctgcctcagcctcccaagtagctgggactacaggcgcccgccactacgcccggctaattttttgtatttttagtagagacggggtttcaccgttttagccgggatggtctcgatctcctgacctcgtgatccgcccgcctcggcctcccaaagtgctaggattacaggcgtgagccaccgcgcccggccactattttctttttccctgtttgtcccctagcccggagaacaggttcccttcagactgccaaatataatttcaaaacagttaaaaacatgactctcagtgagcatgtgtcaaaagatttatttaccgtactgagggaagcagcaagatgattctaggaagacaggaaaggaagaataaacactggccggccgcggtggctcacacctgtaattccagcaatttgggaggccgaggtgggcggatcaccagaggtctggaggtcaagaccagtctggccaacatggtaaaaccccatctctactaaaaatacaaaaatcagccgggtgtggtggagcagcctgcagtcccagctactcgggaggctgaggcaggagaatcgcttgaacctgggagacggaggttgcagtgagccgagatcgtgccactgcactccagtctggcaacagcgagactccgtcaaaaaaaaaaaaaaaaaaaagaaagaaagaaaaagaaaaacactgaaataaaagcacaaagttggatacaaaactgcttagtgagctacaaagcgatacactggacagaaagcatttgcaacctatcaacctgtacagggtagcatataactggacagcatctggactcctaagttttcctaacagttttacctcggattctccctgtctctcttcgtgctgtcatctttctctaggtcttcgaaaactgtcaatccatcttactgtatctctaatttctgtcccttttctcccttcttgtttctgtccctctcccttcttgtctacctcttgagtctggatatctgcatttcttgtctctgtgaacccattctgcgtttccttctttgtgtctctttcatctgcatccctttctgatctgcctctctcttgctaactgttctgacacctgtttgcccggccctgaccctctgatccactcagccctcttataacttggacccgtgtctctatgtttgttcacttattttcactgtctctcctcgcgtcgagtctccggtcctcccagtctgtgagtctgtctctctgtctctctctctcttcctcccgccggtccttcgtctctctttgcccttgagtctctggtctctctccgtctctcctcgctgtttctatcgatcggcatctctctgccccagtacccttccccacctcttcatcccacatgccccattgcattttcaacgcccgccgcgtctccgggttacccaggcgatgtcgagtcgtgtccccaggttaccatggagacgttcagggcccgcccctcgcccatgatcacagaggaacgtcatcgcgccgcgcgcgcacgtacacacgaagggcctgctgactacatctgccggaaagcatcgggccaagcctttctccattttgcggtctaggaagtagcagaggccccttcctgtagggagttgccatggagacgcggtggggcaccgacggagttctaatgacggccgtgattggtgcaggatcctgctaatctcaggaaggcccgtagagaagtgaggaaaacgtggtggggggcatgcgcgatctggtaggcggtgctgccgtctgttgtacctgagaggcttgcgcatgccgacgcacggattcgaggcggggagcatgggaagaagcggccaggagtatgacctgatcattgcgaccaccgctaggggaagggaggagagggtgtagaaacggggacgagggtgggggaagggcaaggaggcgctcgagctggtgcgcggagcatcctgggagacgtagtccagcgggagggggaagtcgaagactgcgcgtgctcaggagcgcggagcggcccgctgagcgcagaggtgagggcggggtcctcttaaccgggagggctatcgtgtggacgggggcggtggctgcagactcggggattccggctccccagtgagaccggaagcgcggggaacgaatccgggcmgtccttgcgggagcgcccagggctagagcgagaggcttgtcaatcactactcgttgccacgacgacaggctttgggagccccgcccccggttgcctaggcgtcgtctggacctaccttggcaccstggagcggaagttgccgcctggacttctgggaagtgtatttcgggaccctccgtaggtacctgccatcttggctatgacccaagtctctcccagggtttcaggttgacttggcaccttgaagagtggaggcttggcccccaggatgaggcggccctcgaaatcgatgccacccacgggggaatgattctgcggtgccatccccttcataaacgcagattccttcctaaagccgcagctgcagaaggaacagcgcgaggagggaggtcagccccacttgcaaatggggaaacargttctcgaaggcacagtgatctgaagatgggcggaatcagagtctcgggacttccttgcaggctcctgttccggcagtcttggagcctttgccgcccccccacccattgcgaagctcccccatccccttccaaccccagctaaatcaggaagctgagatggggcattgcgtagtgtgatgttgggcttagaagatggggctgagtagggagagagggtgctgcctgggagctgagccatacaagtgactgcacaggttgacatggaggattaggtggagtgaggcttccaagcwgggaggggaatgatggtggggcccaaatgaggagccacatcgaagtagatgagagaatagaaggtgaagtaagggctggcgttgggtagggggagacgccagcagtgatgctgatgcccaggctgtaggtgtataggtgccatccacctggtaaagagagagctgtagcgcaggaatgaggttgcacatgtagaagaagggaaggatacaggggagagaagtgtcttctagtcctaaaaaacagcctgtgggctggcatggtggaacaaacctgtaagtcccagcacttcgggaggtcaaggtaagaggatcatctgcttgagcccaggagttcaagaacagcctaggcaacatagtaagatcccatccctacagaaaaattaagaaattagccggatgtcgtggcacacacctgttgtctcagctacttgggaggccgatctctggagcccgggaggtcaagtctgcagtgacgcatgatctcgccactgcacttcagcctgggcaactgactgacagcatgtctcaaagaaaagaaaaaaaagcctgtgtttggagcagggagactgtcagagactttgcacaggcccaagcggagagaagaccagggatacaggtggctaagggagggcttccagctgcataagtctgtgggttgtagatggcctttctttgcctgtttcctcatctgccttccacatggggtaggtctgaggatcaaacggtacagcatagactaggcagtgaagcattcactgyactccttttgcaacagsctcatcctatttcttcaccaggggcagacactggcctcagatacctgacctggtaccctctatgaggcctgcggtgctgggctccccagaccgagcacccccagaagatgaggggcctgtcatggtgaagctagaggactctgaggaggagggtgaggctgccttatgggacccaggccctgaagctgcacgcctgcgtttccggtgcttccrctatgaggaggccacagggccccaagaggccctggcccagctccgagagctgtgtcgccagtggctgcgtccagaggtacgctccaaggagcagatgctggagctgttggtgctggagcagttcctgggcgcactgccccctgagatccaggcccrtgtgcaggggcagcggccaggcagccccgaggaggctgctgccctagtagatgggctgcgccgggagccgggcggaccccrgagatgggtgagtgagtgtccacgagtggggttcaggactggagcatcatccagctcggcctcaccctgggcagcaccacgctttgccagacacacgttctcccttgtggtacagaagtggccacctgcaacagagaccctgtgcaaggctgcccagggcagagggattccagggccagactccccagcccattcctgcatcacctgcagtcacgtggacataggagctgcaggctaggggaatatggggaaggtactggaaggccacgatgtcagagcaggggagggactgcaggtggtcccttcattctttgctcagggcctaggggaggtaggtccttggaggacctagtcagtaggtatttacaaggcaggcccctgggatcctacagtgggatgggcacccacaaaccccaggttgcggccagccttactctctggtaggacttctgatggtgggggcacctccccaggtcacagtccaggtgcagggccaggaggtcctatcagagaagatggagccctccagtttccagcccctacctgaaactgagcctccaactccagagcctgggcccaagacacctccyaggactatgcaggaatcaccactgggcctgcaggtgaaagaggagtcagaggttacagaggactcaggtgagggcatgcacggtgggcgcgcctaaggtctggttgggtgggccagggaacctggcctgagcagtcagtctgaagtccactgggccaggtttgttataaatggaatggtttccatctgccagcagcccccacattctacccagtcaggtctcccctccaccgcagccagtgctgtcactacccctcacacaccaagcctgactgccacagccctgtacccacgaaccccatggcatggagcaggctgttggggtttcccagtacagatggcatgtggtgttcagtccccaaggagatgcgttaggcaatatgtgcttgtcactggggaacagacagcaggcagaggtataattaggagctgctgagggaggacctcgtagtgttaggggtatgacccctttcacctcccaggcagggcacctgaactagctgctcacaccctgccattcctatgtggacccttgtacaatacctctgacccccgctgaccaccttgccccatggttcacatacggctacaggggcacaaacctcagcccatctcatcccactgcagctcaacccctggccttccagggtactctgcttcacccagcccctgagctgggccctcagctaccctgcactgccctccccaacccaagcccacaaccaagaatcccacctctctgcatcccagcacctggcacaccactaagaagggcagtggggtggaaactcactcaggctgcctgataccagttttcctctctagatttcctggagtctgggcctctagctgccacccaggagtctgtacccaccctcctgcctgaggaggmccaggtaagtcctgcccaggtccatgttctcctcctttccctggaagttgctgggtggggtcaggtaggtccctccctgagcccagccaggcacagaggagcagtgaccactgtgatttcagagatgtgggaccgtgctggaccagatctttccccacagcaagactgggcctgagggtccctcatggagggagcaccccagggccctgtggcatgaggaagctgggggcatcttctccccaggtaagtgagatggggtgtggtgggactaggccttccgcatggacagcaccatctctgccgaccccactcctggccctacgcaggcagccctcttactccagcatccccaagttcccccattccctagatcatcccctataaggttcaacctcctctagcatcttctgccctcaaaaaaagccacccaccactaccactgatcccacagcccctctactttctagaaactccccaccctagtaaaaccttttgcaagcagggcgagtattccccgtacccacattctctcccagtcctggtatcctggatggcctcctgggcttgcatcctgctggtcaggcatcaggacaggtagggctgggacctgacaaggacagcaggttagtagacagagcaggtgggcaggagggaccttgacacaggatagggatcctgcccaatcatcgaagcattacggaccagaggccccctgccatctacctctcagccaccacctttgtctggcatcatccaggctcctcctacaacccatcttctgttatgttccttcctgttcctgagacccagggtctcctctttcttagttcacacctttgttttggtggagctttgtgggtgttctggtgtggaagataaaattctgacatgtcccatatctgaaacacattgtctagccctcaacattagattgaagtttggctggaagaattytttttattagtacagtcacagacctttttttatcactattgttggtgagctttttcagtttgaaattcacatctctcagttctgggaaactgccttgaaatttttttttatttccttcccttctattgctctgctccctgtttctgggatgcctcttacttggctattggcatctgggatgggtcctttaatgttcttatcttttcactccaattttccattcctttgtctttctactctattttcctggaaattttctcacttgtatctttcagaccttctgttaagattttcatttctggtagctttttttttggtggggggagggggtctcactatttcacacagactagagcacagtggtgccatcatagcttactgtaaccttgaactcctgggctcaagtgatcctctcgcctcagcctcccaagtatctgggactgcaggcatgtgtcactgtacctgactcatttttaatttttttatttttttgtagaaacaggttctcactatgttgccagggctggtcttaaattcctggcttcaagtgatgctcccacctcagcctcccagagtgctgggattacaggcatgagctacttcatctggtctcttgtagcatatttttactttccaagagtgtttttattctctgaatgttcatctttttagctgtctcctgttgttctttcatttacaatgtctttccttatttctctgagaacagcagtaactttttaaaaaaaaacagtgtgttctctattctctcctagttgttggcttatatgcaagagaggggcaccacaaatctggctgacagctctgagcaggtagatgtggggcttactggctggaagggacataggggaaccccactccccaaggagacccttttcttagggtatgtgagcaagcagcttgagtatgagtggatgctgcaaacagatccatagggcaatgtggctaggccattttgggggcactcttcctccaagcatgtttcgttccatcgtctgaatcctgcaagaaggtaacttcagcctcctgccagcatccttgggaaagagattaacatctcagcatccaatgggactgtttacctaataaccctgactttctcagtacggtttctcacccttaacatagccttctgccaggatgggagaagaaatccagaagtaagtcatggcagtgcatactgttggctcagaattctgtgcagacagagcccacagcagcagccctgcccagcatctgcttctgaaacagcctctccagcctggctggtgccctgctcattcacttgcatggccagaagtaccaggtacctccaactcctgagtttttagaatcttcttagccaggcgcagccgctcatgcctgtaatcccagcactttgggaggcggaggcaggtggattgtttgagtccaagagttcgagaccatcctgggcaacatggcaaaaccctgtctctactaaaaaataatacaaaaaactagctgggcatggtggcacgtacttgtagtcccagctacttgggaggctgaggtgggagaatcacccaagccagggaagtcaaggctgcagtgagctgagatggtgccagtgcacaccagtctgggcaatgggggtgagacccagtctcaaaaaaaaaaaaaagagtcttgggaataaaactgtgccttttctttgcagccagagaggtttatctatctatctatttatttatgaaatggagtcttgctttatttatttaaaggacagggttttgctgttttgcccaggctggtcttgaactcctgacctcaagtgatcctcctgcttcagctttccaagtagctgcaattacaggctcaagycaccacacctggctcagagaggtctttttatgtcttcatcaggagactattctgaatagctaatacattcatatgttaggaaattcaaaaggcacaagacagtatacagtggaatgccccttccctgcctgggccacacagtcttactctccagcagccaacactgcttgtttcttatgtgtctttgtaaaaagattctgtacatacagaagcaaagacattcccagacacatgttcattcccttttttttttcttttgagatggaatttcgctcttgttgcccaggctggagtgcaatggcgcgatctcggctcactgcaacctccacctcccggttcaagccattctcctgcctcagcctcccaagtagctgagattacagtcatgctccaccacgcccagctaattttgtatttttttagtagagacggggtttccccatgttggtcaggctggtctggaactcccgacctcaggtgatccgcccaccttttccttccacaagttccgggatcacaggcgtgaaccaccatgcctggcccattcctcttctttttttttttttgagacggagtctcactctgtcgcccaggctggagtgcagtggcacaatctcgactcactgcaagctccgcctcccgggaggcggagcttgcagtgagctgagatggcgccactacactccagcctgggcaacagagcgagactccgtctcaagtgcgcacacacacacacgggctgggcgtggtggctcacacctgtaatcccagcactttgggaaggcgaggcgggtggatcatatgaggtcaggagatcgagaccagcctggccaacatggtgaaaccatgtctctactaaaaatacaaaaaattggctaggtgcgrtggctcacgcctgcaatcccagcactttgggaggctgaagtgggcagatcacctgaggtcgggagttcgagaccagcctgaccaacatggagaaaccctgtctctactaaaaatacaaaattagccgggtgtggtggtgcatgcctgtaatcccagctactcgggagactgaggcagaagaaccgcttgaacccaggagatggaggtttgcagtgagcagagaacacgccattgcactccaacctgggcaacaagagcaaaactacgtctcaaaaaaaaaaaaaatacaaacaattagccaggcatggtggtgcacgcctataatcccagctactcaggaagatgaagcagcagaatcgcttgaacccgggaggcagaggttgcggtgagccgagatcacaccactgcactccagcctgggcgacacagcaagactcagtctcaaaaaaaaaaaaaaaaaaaaaaaaaaaaaaaaaaacacacacatggatgcttattctccaccctgttccacatctggcattttttgtgcatcttccaacttaagtacacagcagcaagtgctctacatctttgggtagctacacaraaccccactgtggctcactgtggacacaccattgaaaaccttgtatgtaggtcacttagtacaaggaggaacacaactgttgaagaagtacctaaaaattgaattacttgaacaaagtgtgggacatttgctgttttgatggattttaccacactgtcttcccatttatgcttaccagcaatacataggaacacttgggtccctgcagtcagggtgtggaaatggcagatgagttcagccctaaggtgcatttttcttactaggaggagatggagtgtattttatgggatataagcattagctacatttcctgtcctgttcacatcctttgcccatgtgtctatgaggttattgatctttcttactgatttattgtagctctttacttaggaggttaattagccttttgcctgtggagagttttttggtttgccatttgtccttttttaattttttttgttttttggccatttgtcttttgactcygatgtggtttttgctgatttcctttgatgtattctagtttatctgacttttctttggcgacttatggactttctctcaccactaaaagccctcactgctctctcagtcttcttgatttaacctcctccaggcttccgccttctccaggccctgattctcagttggagttgctggtgcctcctccttcacccagcgtctgacgctggagtgctcacagtgtggctgggacccacttctctcctctgtagatacccacccctgtgttgatcacttgcaggcccgggttctgtgtgccatgtgtatgccctagagcccttgctcacgtttccccacagccttcatgaagtctgtgttcctcagatgccccacagacatcacaagcaaggcacatccaaaccccagaccactatccaggagcctgcaccctctttctgttggctccacctccagcctccgagacccacccacttccctgcatttgctgagaccatcattttccacctagacaatgcccccacgcttgccctacagcccttccaaaaacgattttttccaacytaaatcagacctagaaagctttttcacatagcccagtcttcctccttgtgctgggttctgtctcattatcacctcatcagggaagtctgtacagatagaatccctacccctgcatttgtcgcctccgtctgcctctttggtcagtttcaggtccctgtagttcacactgtgtccccagggatgaagtgggtcccggcacggtgggcattctgtcatgaatgaatggtccccttgtgtatgcagggttcgcgctgcagctrggcagcatctccgcaggtccaggtagtgtaagccctcacctccacgtcccctgggacctcggcatggctggcctttctggccagatccaatcaccctcccgcgaaggtggctttgcgcatgcgcttctgctccccagcgatctgaggagtgaacaggaccccacggacgaggatccctgccgsggtgtgggccctgctctgrtcaccacccgctggcgctcccccaggggccggagccggggccgccccagcactgggggcggggtggttaggggcggccgttgcgatgtatgtggcaaggtgttcagccaacgcagcaacctgctgaggcaccagaagatccacacgggtgagcgaccattcgtgtgcagcgagtgcggccgcagcttcagccgcagctcgcacctgctgcgccaccagcttacrcacaccgaggagcggccgttcgtgtgcggcgactgtggccagggcttcgtgcgmagcgcgcgcctggaagagcatcggagagtgcacacgggcgaacagcctttccsttgcgctgagtgcggccagagcttccggcagcgctccaatctgctgcagcaccagcgcatccacggcgatcccccgggccctggcgctaagcccccggcccctcctggtgcgcccgagcctcccggcccctttccgtgcagcgagtgccgcgagagcttcgcgcggcgcgccgtgctgctggagcaccaggcggtacacacgggcgacaagtcctttggctgcgtcgagtgcggcgagcgcttcggccgccgctcagtgctrctgcagcaccggcgcgtgcacagtggcgagcggcccttcgcctgtgccgagtgcggccagagcttccggcagcgctccaacctgacgcagcaccggcgcatccacaccggggagcggcccttcgcctgcgccgagtgtggcaaggccttccgccagcggcctacgctcacgcagcatctccgcgtacacacgggcgagaaaccctttgcctgccccgagtgtggccagcgcttcagccagcgcctcaagctcacgcgtcatcagaggacacacaccggcgaaaagccctaccactgcggtgagtgcggcctgggcttcacgcaggtctcgcggctcaccgagcaccagcgcatccacacgggcgaacggcccttcgcctgccccgagtgcggccagagctttcggcagcacgccaacctcacccagcaccggcgcatccacacgggtgaacggccctacgcatgccctgagtgtggcaaggccttccgccagcggcccacgctcacgcagcatctgcgcacccaccgacgagagaagcccttcgcctgccaggactgtggccgccgcttccaccagagcaccaagctcattcagcaccagcgcgtccacagcgccgagtagctccagccgggacgcactgtgtccgccatggtcagaacacctacctcccctggttattgtgaggctggcgattacataagtataagcaggtccgcccagggcttggctactgtaggtgtccaataaacagtagatggaaactgggtctccacccactcagtgcctccctacctgtgcgtccttcactccccaccctccagccccccgagtgctgggctggtgtgctccctctgtaaccacgtggttcctgtgagggttcacctccacaacacccctcttcaccctgagagaggtggctcctagcatcacctaccccgcgtgtgggatggccgctatacccagcttctagtttacagagggaatggaccagcagcaggtggggcagaactgccctgggcagtccagcttcagctctccctgggcaatggacctcggtttctcaaacccagagaggaagaaatgttctctgtgagcatccaccaagagtacatatgtgcatagcatggtgccatgcctgatctgattgagtcccatcaagagacagagcacagctaactaggtgttaggtgattgatgggagagtgagaaggttaagtcaatctgtcttagaaatgggaaagttcctgcaggaagcagctagacccttaggactagaggaacaaagggaagcattgcaacttagaagctccaatgagtttcccatggagctggaactcaggcccctgagaagagggcactgctgagccagtcctggggtctcttagctggcagggaagccctgtgggcctgagggggtactgctcagctggtctggaggtctctgttctcaagagggtgccccataggcctaggagactcctgagggggcactggtgtgggtgtctccaaggggcccagtgagcctggttctgggaggtatgtaaaaactgttgctcctggaaggacctgctgttgccaaggggaagaggtggtgctggcctagtctcttctccctttccaacccctgttccagcctgcccttaacagatctgcaagtgaagagaggtgtttgtagtctctgccctgcacagtgatgcctaggtgggtaggtctggagcccagccttgtctggtgatgaaatcccatgggattttcccttgacactgagaccagggcctccaagggctgggagaacactcaatcctcagggaggttaccagcctcctgagcaccagtcctccttgctccaagtcagcgttaatgattcattcccatgatactacctctcccaccccagctcagctgtacagctacccttaccctaacagcaccctactccctaaagtggtcctgagcggccaaagctttctacctttatctacctatcagtaggagtacccgctgaagagttgtactcatggggacattcagcatctcacycttagtactagaggaacaaagggaagcagtggggtcacagcacttcttacagctgggagccaaggatcccacttggatctgccaacccccaggtttgtgggtggtactgtgcctaaacttgatgcctgcaacctgcatgctcccctccacaccctgtcacggctgtcccctgggccatgggccaagccaaaccccaggaaaggacccagacaggccagaatctccctagccaaccaagattatgcgatccagcaggagcaaactgacacctggtgatccagattctgcctcaggatgtctttgtaaaactcctttacacctaggaaaccatttcctagttttaaaactagaagatttcacctggaaattcagatttttcaagactttcctgttctcgtgttcacaagcagcaggtgatgagggtgtaggaccctgcagatggaaccccagccagtctgagaagcaaaggctgcaggccctgggccagtttccctgccctgtggtgatcattcccatcgctagagctgaaggcttctcccaccctggccccatgcacattggaaggtttcagtcaggagtagattcagcagcaaaccagtggaaacgcagcttaggtgaaagtggacagatgctgagagcataagttcagcatactgcaggcttcagggcagcgtctccaggacccagtgccattgcctrttttgccctagccatcttccccttccatcccattgtccaggtccttcacacagcccctctcccccaaccctccagtgggtgacttgggtgcaggtaacacaggctgaaaggcagtttcaaagaaggggcttggccttggccagaagccactcctgggggagcatctgcagaatcagaggagtggcgcctgggcccctccgcaggcaagtgccacaccatgcgctcacggggctggcagtttccgtggtgacggccggaagtcgctgaccsgcagagttccgtttcctcccgccctccgaggcacgctgagctgtgattggatgggaagctgacccccgcctccatccccttttccagatagtgggggaagcgcagaggctgcagtgcgtgtccgctggaacttgrggcccacgccaatagcggcccgattccgcccccacgtcgcgttccccaagtgtccaccccgacaggtcttcccctacaccactgtaaccctccacagtgcttaccactctctggcacaatacatgttttgttagtttacctcaatcagaatctccaggaacggggatctttgggtttgcgatgggacagggaaggtactcgacctcgcaccctctgggtaacgcatctagtctcactcagggtcttgccgcgatcaccctgccttgtctgtgacccatagggtcaaaggcaggccgggcgggtggcggcagcagcggaggtgaccacccgcgccgcgmtctgcacatatatacaacttaagatgaagtgaccgcgagcaaaagcggcccacgtctgccccactcaaagatggcgactaactccgcttcctgcccggccccgcgaaagtcgccggaagtgacctgcaaggccgccgaagcgtcatctccatgaacggaaatgcccgagtccagccgaaggaggccgaaccccaaactccatcgctgagcaacgcgggtttgcggcggctgcgcaggcgcacaacgcaggccgggcgggaagagccaaagcgggcaggcggcggaaatatccgaagcggcggggcgcccgaggccgttgccgacctycgcgctaaagccgctgctgccgcggaagacgatcctccagtacccgcccgccgtcaccgcagctgccgtgtcctcctcccacccctagccgcaccccctcgcggagggatcagctgagcggccaaacggcacggtcgggggagccccgagtccgcagctgcagcggggcctgagaccagagttggcgagggcaaggaaggagcggccccgggcagtgggggcggggccgggcgggcccgagaacagccgaatttggccgagcgctgccgagcgagtccgaggcgctgggccaggccggagccggactacgggagccgaggcgggccgcgcggtgggcgcggagaggagcggagcggcgcggcaggccgggcgggtggcggcagcagcggaggaggccgcagctgcgggtccgaggagcggaggcgacgcgggcggcggcggggggccgggtggccggggtcccgggccccgcggcggcggcagcggcggcggcggcggcaggatgatcaagctgttctcgctgaagcagcagaagaaggaggaggagtcggcgggcggcaccaagggcagcagcaagaaggcgtcggcggcgcagctgcggatccagaagggtagggggtcaggggatggggttggagccggaggtcggaggtcagggcctgaggcagggtgatgtgggagtcaggaaggggtaatgcggttgctgagggtcagaggtgaagggccccgagcgtggggggggtcggaggtcaagtcttgagggttgggatcatgcagtcacggggagggggtcagagataggggcccggtatgtggtggtttaggatattaggaaggcctggtgtctgctactagggactcggaatctcagagtcaggcagtggagtggaggaactgrcgactcgagagtctgggggttagacgggaacttgggtttggggtgacaggcggagaagagagggatagtagaggccaggggttggggatatgagtggaagaggatttagtttattatgctggggtctctgggaatctctgagtcaaacgggtgaagtaggttggaggaccagggactcatgggcctgcctgagtcacagcaatttggggtttggggtgacaggtggaggagggaaggttaatgagtaccagggattggagacaggggtgaggggaaatttaggctattgtgctgtgaacctcagagtcagagggggtggggtagggtggcgggggttggggacttgagagtgtgggggtcacatggaaagctgggtctgagagacagagaagaggaaggacagtgaggactgagggttggtgggggtgggcaggatctttgagtttgggtgaacaggtagatactgtagagtggaggtcatggatggggagcctggggtttagggcggtcagaggatgtttgggagtgggggcatttgggagctgtggatacagaaaagttgggggtcaccctgggccaggagttgggacacgcatacacagctgaacatgcatgtttggggtatgctgtgtatccacaagagccaagctggggagcagggagagggctggaggtgtggagcacagcccaggagaggcgcctgggggtccaggaggagacgatgggggctctgctaacaaacacccgccctaagtgtcctgctggctccctctctctctctcttcccctccctctttctgttcccgactctctgctacccaaacccagacataaacgagctgaacctgcccaagacgtgtgatatcagcttctcagatccagacgacctcctcaacttcaagctggtcatctgtcctgatgaggtgagggtgcatatggctgaattcccaggagcaaaccaagggtgtccccactgagaggagggagacatgttctgcccatcgggccccacaggatggaaccctaaaattttcttctcccccttttcctcccagggcttctacaagagtgggaagtttgtgttcagttttaaggtgagtcccaggcgggcagggatggctccctggacagaggaggcagcagctgaggcccttccaggcacctacccatctctcttttcttttcctggagccaggtgggccagggttacccgcatgatccccccaaggtgaagtgtgagacaatggtctatcaccccaacattgacctcgagggcaacgtctgcctcaacatcctcaggtgaggacactggccctctaatgccctcctcagcgctgcctgccaggcctccctcatggtcttgtgggcactacatcagactctgtcccttcccacccctttgttgtctgtggtttcttgatttcccagtcatcttcctcatggcctgaccttggttttctccttggcctgtcctgctccacaccctccctcccagcctctcacatgctcactctcctatgccctggatctgacctgcccaacaccagaggggcctgtggcagtctcccactcaccaagccctgaccctgatgctctctgtccacagagaggactggaagccagtccttacgataaactccataatttatggcctgcagtatctcttcttggtgagtaggaayaggtggttgggtctggggagattggccttctgtccctctggcctgttnaccccccctacctgtactggccacaggagcccaacccygaggacccactgaacaaggaggccgcagaggtcctgcagaacaaccggcggctgtttgagcagaacgtgcagcgctccatgcggggtggctacatcggctccacctactttgagcgctgcctgaaatagggttggcgcatacccacccccgccacggccacaagccctggcatcccctgcaaatatttattgggggccatgggtaggggtttggggggcggccggtgggggaatcccctgccttggccttgcctccccttcctgccacgtgcccctagttatttttttttttttaacaccatgtgattaaggtcggcgctgcctcccccgacccactcagcgatgggaaatgaattggcttgtctagcccccctgctgggtgcttgttcagcccccactctgggctgtggagtgggtgggcaacgggcctgggtagctgggcccaggcaacccacccctccacctctggaggtcccaccaggctattaaaggggaatgttactgcatggcctctgcttcttacttctatggggtgggaggggcagctgaggtccattagggcctgcaaagctggggtggtggaaggtgtggtcacaggtggcattggagcaccctacaacaggctgcccagtgcctggggcagctctaaagttggtggggataccakgactgtgcctggggttggttgggatgaagcctactctaggatgagaagcgtaggcaggatccagtgacctgtggcttcctggccaagaggccagcaaagtggaagaaacaagccatctctagctttgcccctttcttgtgtgggtgggcccaccgaggaggaggagccttctgaggctccttctatctgaggcctcaggcagaagtcaaggtctcacgaataagctgggtcctcaagtkgaggttgggtggaaagcgcccaccccggtactggcttgggtcactcgggcgggactcaaaacatgaaacactcggacgcgcagaggaaacgggagctgttgcgcatgcgctcggacgctggcccgttccggggcacgggcgcacgcgcgctcctggagtttcccaaccttccgggtgcgggcggggcatgttacgtcacgtcgtttaatccggaaacggcggcggcggcgacaggaccgaggggccttagttggtgggcaagtcggggatcccagaaagagaagcgtgacccggaagcggaaacgggtgtccgtcccagctccggtgagtggcccctgctggaccgtggatcccgggcgggcgtgcgggcggcagcgtacgaggccttctactcgcccgggtgtccggtgcctcgcttctccctgggaccctgtcgtcaacatcgaggtctccaacaccaccttgctttggtgccgggcccactgactgtcctcggtgtatagtgcgaccgaatctccatcatcccgtcctcagtgtacaggatgccccagcgcccccaaccgtctccctcagcattcagggtccccaaatcctaatgccttgtcctgagcttcacagccccacattcacctgttcttggtacttagcgtttccgcccatcctgtcctcctctatcagaacccccacaattgctctgtcctcggtgcccacagtctccaaaacaccagtgcaccggcccgcgtcatcccccgctctcagtcgtatcaaggactccagggcctcacccatagttctggagagggaagctgaacttgcaagccataacttcttttggggcatggcgatgaaggaggggctcgggccagcacttggataattttcaggtctacctgtccccctttatgtgtccccgggacaatcccagtgttctcagctgctcccttttggctcctcattcctgcctccagtctccgttagccccttcccatttggcaaggctcccgtgaccctgttctgcttcttgccctcctgggccccatgccctacaactgggcctcactcacatctgtctcaggcctgccagtgagcttctaccatcatggacctattgttcgggcgccggaagacgccagaggrgctactgcggcagaaccagagggccctgaaccgtgccatgcgggagctggaccgcgagcgacagaaactagagacccaggagaagaaaatcattgcagacattaagaagatggccaagcaaggccagatggtgagtgtgggtggtcgggcaggttgctgtcaatcaggcacggctctaacagcagtgaacaagagagaccagacaccaaacacaggtgctttcagcaaaacgagtggagtgaaaggtcagcagggcttccctagtttgagggtctggaaggctgcctccaaggaactggtatgagatccaaggcttgagtgatgagagtgagcctacagatctgggcagggaatgtgttaagcagacagagcagcaaatgttaaaaaagagcctcaaaaaaatgggagatgacaggtgagcttcaagagttgggcatggaccagacaattcagaactctgggccaaagtgggagctaagttggaaggttagggattacagggccgggcgcagtagctcagagacctgtaatcccagcactttgggaggcagaggtggttggatcacctgaggtcaggacttcgagaccagcctgaccaacacagagtaaccccgtctctactgaaaataaaaaaaactagccaggcatggtggcgcacgcctgtaatcccagctactcagcagggctgaggcaggacaatctcttgaacccaggaggcggaggttacagtgagccaagatcatgccactgcactccagcctgggtgacagagcgagactctgtctcaaaaaaaaaaaaaaaaaccagttaactataaggataagctggcccggcatgatggctcaagcctgtaatcccagcactttgggaggctgaggtgggtggatcacctgaggtcaggatttcgagaccagcctggccaacatggcaaaaccccactctaccaaaaattagccgggcatggtggtgcatacttgttatcccagctattcgagaggctgaggcagaagaatcgcttgaggccgggaggcacagtttgcagtgagccaagattgtgccactgcactccagcctaggcaacaaagcaagactccaactcaaaaaaaaaaaaaaggtaagggtaagctataagctatggccaagaggctggtaagagacagccggaaccagtagggagagcatgaagaaggaacacagcctttgatgggtgagagggttttggcctgaacaggtaggcagagaagataccatttcttgggatgggcaagaaagatgtttggagaggaaatcaaaagctgagcctcagataggtctgtatgtgattctggatagttcgaggtatgggtttgtatcaggtgaaggaagagacagattctttgtctaggctgggaataaaaattgaggaatggctgttgtaagtcaaaagaatgactgaaaacatggagggaaaaggaaccctcaggagtgagcctggggcctttcttttaccatttacagatcaagagaagtgaggaggaccttacaaaggagcccagggagttggtggcccaagaggcagaggagggttaggtcagaaggagggagggaccagtgaccattgggttagccagagtctctggaaacttcaagtggaattgcaaattgggctggtggggagggacaaccaactaatggggtgtcaagaagtgtaggataatctcattcctgtgtccttgatacccttgtctactctgcaggatgctgttcgcatcatggcaaaagacttggtgcgcacccggcgctatgtgcgcaagtttgtattgatgcgggccaacatccaggctgtgtccctcaagatccagacactcaagtccaacaactcgatggcacaagccatgaagggtgtcaccaaggccatgggcaccatgaacagacaggtgcgcttttcccaatcccccttcccactcccacgacccatggggatcacactcacactcctgtcacttccagctgaagttgccccagatccagaagatcatgatggagtttgagcggcaggcagagatcatggatatgaaggaggagatgatgaatgatgccattgatgatgccatgggtgatgaggaagatgaagaggagaggtatggggaaactggatgggagggtggagatgtttgcctggccctcacggagtgcatagccctcactgagttctctctcttccctagtgatgctgtggtgtcccaggttctggatgagctgggacttagcctaacagatgagctgtcgagtgagtgctccaaatcctggaccccatttcccacccaaggcccagccacagctccaagccctccctttccctgcattactcccctccgctgcctgaccccacctgctcaaacccccactttctctgcagacctcccctcaactgggggctcgcttagtgtggctgctggtgggaaaaaagcagaggccgcagcctcagccctagctgatgctgatgcagacctggaggaacggcttaagaacctgcggagggactgagtgcccctgccactccgagataaccagtggatgcccaggatcttttaccacaacccctctgtaataaaagagatttgacactagtctccaggcccatgtgacttttggcctgatgtgggaccagactggggtccctgggaggatgggcatcactaaggcaagaggcacttggtactaagctaagggtgggggtttggggcaggggtgaacaagcaaagtccacctgggattttcaggagctgggagcttcaggtgagctgtgggcccttctccatcacctctcccaagatactggactgcccaaacaccctggtaggatcttgagagtccaggcctcatctgccaggctgtagtgtccaacactgtttggtccagtgatggtttaatgacaacactcaaggacagtccagaccaaccaatagaggcaagggggtggccttgggattcacacaggctcgactgtagagtaactaaatcataacacagagatgaatgataatgttaagtggactcagcaaagggagacagggaaaaaaaccacatctggaaggtctcagttcactgtgggaccttctgaagatgagaaacagctacagcaccaaaatttaggaagcattcagtagagtggctgtgctacacctggggctaaccctgcctacacagggatgtaggtcacacctacccagtatcccacagggtacccaacaagcctctagtgtgtacatcctttgccctgggtgaccctccccatacccagaaagggcaaggaggcagtcttccccactccctaggcatccatacacatgggcttcgataggtgggggacaagacccccctcccttgtgccaccagtgcttgataaggctgactagtagatacagtcaataaaccaggccccaggaccacagtcccccaaccagccaacgcctgaggaactggkgaagtttttattaaatccacagaagtaaaaaccatatcgtgaggaactgggggatggggccaccagggagtgggagtcaggccaccaggggagtggggatggggtgacaggacagaraacagagccaggctgggctggccatgggggcwccagcctcaggggccatcaccagggccaccagacagctcctgggaactcaggccagcaccaggcaggctcatcggcgggggctccaccagcacagcagagaacttggtgtcaccgaaggcctcgttcatgcgcgtctcgaaraagcgctgcaggccgatgatggactgcacgtctgccttgtcctgggccaagcaggaatgcagtggatgaatgggtcctagttctttccttcacatctccccctgcccacagcctctccattccactggctcacctcagttaacttgttgaattgcttgaacatgcggcccacatcctgggcaaactcctgtggggagctgtagggaggtgacaacttctcctggaggcgggcacggatcagggtcagatccagggtgccaccgggctggtcctgcaggcagagatcacacatacacacacaaagacacacatatacatgcacaggttgagggcgagacccagcagccaccacccccttcccctttcccatcctaggactcaccagggagaargtggagtcggtagccagctgatgcagggggcggcarggttcgtgacagaatagggccagcagtacacgctcacatttctacaaacattgtaagggatgtcacagctctgggcagcacctataaagcctctctgggcaaccccacctaagtaaccccagccctcacccgctggttggctggtgagagcttggccaccacgccagtgctgtctgcaccatccaggctgaggctgccatcctcctccttcaggtcagggagcacatggcagagtgagcagctccactcctccctagggtgaagaaaataagggtctgcacatgatcctgtccagacagcccaacacccagacttgacccccaccagcctcacactcaccctggtacatcctgcagggccggcaggtgacagtccaggtggaaacaaaactcacactggttgcacataaccagatcgcctggcttctggcagacacggcaaatggtggcactgtca

SEQ ID NO: 94560 - DNA, 40193 bp, Homo sapiens
  misc_feature (1)...(40193): n = A,T,C or G
catcattaatacagccataccatcttcaaaattttctccgcattaattctagagccatgggagttcagccttggaattaacactaaaaggcaagtagtccaatttctatgagatgctggaaatccctttgcctcacgcaaactggaaatagaaaactaaatttcaggttaattctttcccatctttacacagtcagactccatcatttgcagagctgaaatatgtttgttttaatccccagtggtatacagacagtcttgggatcatagggcatatgctaaatctcacatgtgtatccaaggcatataagtttcccagtgtctcttgcgtcctctgaatcttctgtgtcatactaaacattactagttcctatagccatgcatcgtgaaacagagttgctatcaatattcctgttcttattgctaggtatcttctcaatgtgcaaaagtttgtctatattctcaaagtaaaacaatcagatttgtacactactgcatttggtatgcttaatacaaaccagtattttctaatgtggtttgtagatatttgggggaccctgaagccctttcagggcatcaaaatgattttaatattaattctaaggcattttaatctttcactttgttgacatttatattgatgatgcagagacaatgatgggcaaaactgatagtgccttagctggaaaatcgtcagtggtagcaaactgtactagcagtcattctcacatgctttacccccaagccctcactaggaaataaatggcaagtttcatttaagaagatccttgatagagcagtaaatagttgttttttgttttttctttttgagatggatttccgttcttgttgcccaggctggagtgcaatggcgcgatcttggctcatcacaacctccgcctcccgggttcaagtgatgctcctgcctcagcctcccgagtagctgggattacaggcatgcaccaccatgcccagctaattttgtatttttagtagatacggggtttctccatgttgggcaggctggtctcgaactcccaatctcaggtgatccacccacctcagcctcccaaaatgctgggaatacaggtgtgagccaccacgtacagccaatagttttaattttattaaattttaatccttgagtatttggctttttaacattctgtgtgaagaaacagaaaggacacagtaaagaagacatctttagtctgctgcacacccagctaccctggttatctggaggaaaagctttcatgtgattgagttgcaagccttaactaactggccacttttattatggaacataatttttacttgaaagaataattaatagacaaactactattattcaaatgtgggcatttggaagcctttttttttttaattgaatgaagtgaacctgtcactacaatgcaagcaactgacagtatttattgctaatgataatatgtgagctttcaagagaaaactagaattttggggaacttgtatttgccatgatgggcatgacagattcttaatatttgaagacactggatgagattgtggtaatattaatgattgtgatcttttgggttatcaaaaatgaaatgtgtcaacatttagaaaatctgcataactcattggacctggccaggctcggtggctcacgcttgtaattccagcacttttggagtccaaggcgggcggatcatgaggtcaggagatcgagaccatcttggctaacaaggtgaaaccccgtttctactaaaaatacaaaaaaaattagccgggtgtggtggcgggtgcctgtagtcccagctactcgggaggctgaggcaggagaatggcgtgaacccaggaggcggagcttgcagtgagccgagatcacaccactacactccagctctgggtgatagagtgagactccatctcaaaaaaaaaaaaaataataataataataaaataaaaattaaaaaaaataataactcattggacctgtattttttagataatcaatacacaatattacaaattcataaacggttataaaagatgcatttaaagtataaaacagaacaacagatttgaatgtgttatcagagtacataaacagattttaatgtattatcagagtacacaaaattcactcatactgaggagacactgacaggccttgctgggcttcctcactcagtcagctagcattagattatgccctttttgtcctatcctatctctacacggctgcccattctttgttaaacttaagcataaaaacagacaatttcttctgtatctttgggtcttcattctaaaggccgctgtgtatacacattaaataaatgtatatgccttttatcctattaatctacttcatgtcagtgattttcagcaaatcttcagagggccaagccctgggccaattcacaacattgcaacttatcaagttttgatgtagtataaaggaagaatatctaaaaaagcctgtgtaaatactcttccatttcccaattatatatgtgtatgacaccagattttttttcatatacttcaatcaaaacaacaattgaatgcaaaagcaaataggagaatccagctgtcttctatcagctagacagcaaagagatttgcaaaaatggaaaactgccacttttctcactttaggttttgaaaaatagctattttcgcaaaatgttattaagttggtatgtaactgcatttattattacttcaaatgacttaagtattttaactttttaagtcagctttaatgtctaatgtggtaaatattgatacatataacatataaactttttttgaggttctcaataattaataagagtataaagagtttctttaccaaaagttctagaaccacatatacagaggattatgaaggtactaaatccttgttctggatactttgtctgtcagacatataaacatatgttttgtgctgtgggatggaggtcagcaacaacatattgctaagtcacatctactcaagtaaaaactaccatgttttctctgttgccttgtacaggtgaaaacataacaggtatgggttccataaggtacattttaggatgtcaaaacctgaaagggatgggtgaaaggatgtcatcttctgatccaaacagctcctgtaagatagaaagctaagggtgaattatctaatgttattcaattggttgttgccatagcttatttgtgaaactggatcttaatgtctcttaatttggtgcttgtgaatcagtactccatgacggatagttgtaattttggcctgagactcagaaaagaagttgcattaaatgtgaatgtctgggatatattcatgggcactgactaagtcaatctaaaagagtgaaggggccaggcaaagtggctcacacctataatccaagcactttggaaggtagaagaagaattgcttgagcccaggagtttgagaccagtctgggcaacatagtgagaccccatctctataaaaaataaaaataaaagagtgaggggacagtagaaagctgaagtaggtcaaataagagaacctagaatgaaaccatggttaatgctcaccaagaataatttaaggaatagaaggcaaggaaaggagtgcagtactaatgtttttctgaatacccacaatgttgcaggcactgagctaagctcttaatacagtttaacacattatatcatcaaaaccactttgtagctattttctccatttatcaaccagaaaatgaagatccagagaggtaaaatatgctcctgggatctcacaaacagcaaacatcaaagataggatttgaatgtgaagtctctctcaaacttgaaagtttgctttcaaataactttcacctctggcttcacattgtattagtctcttacctctttctttggggtagagatgggaggatgacagaaatgtgtagctgtataatcagtttttacatccatttgcagtcagagaacattttacttttgtcttatgggtcatgaattacaagaggcgagaaacaacaaatgtgtttttctataataaagaaaaccagttttagtaaatgtgcttcttgcttgaactattagcacagcacagttaaatgctagtaggcaataataggtattcccgcattacgtgtcatattcatgaaagtttagagctggaaggttaagtgtccccctggggcctcacagctagacacttggcaccccacaatttccactctacctctaaatcagtttaatccacgttatatgtcagagtacagaagttaggtgatatatttaaaattatagtttagcatttgaaaactaccaaaaaactgaatcaggaagctcgagtctgattaagtgggatgaaattgtgatctgaaatttaagccagtctctccaagagttgaaccacctaaggcggagttcaaacaaaggctgaagcaggaaggtttgctgggggaaatcagtggggtcccctgagcagcgtgaagtcatcaggccaaggtaatgcttcccagaggtgtaaccgctgtgtgtgtgtgtggcgtggcgggggggggcggggggaagggggcggaaacgcgcagtactttgcaggtcagcccctggggactgggatggctgactacctggtattgcactaaaatgcttgacccctaatcacatcccccaacactacaccttgtgcgacgtgatgaaagcatcatttccagtttattcgacttttctgtttagacttattcattatagcccatatatgtgataaggactaagaacccagtcttcaaggtcctgtcgagttccaaagaagtccacccctcagaagatccttggaaggggaagaaggaaaaaagaaagaaagaaaaatctgttttaccctataacaatttcagcgcaatctcccaagaccaagttggttaatttgtaaagtcactctcattttttcctcaacagtgccacctactgtccattttcagtcatcagcaggcttgttggcaaggtccaagagaaagaaaggaggcggagtggtggggggaggagtaaccaaaaaacgaactctacccagccttggggcattgtgaaaacgacgaggaaaggccatctccaagcaagacatatttgtcctcgtcaactttgcagaaggcttgcaaaaagcaaaagccagttaagccatttccttcaagatggctaaatataagtcctccagaaaacaatttttattattttatttttaatgcgcgctgtttgagtatgtttacgttaggggaccagattgagcaaaaatatacatataattacttttctatgttttccgcccacccacggcagaaacctctttatgagaaaggctttgacacttgacgtcagctcagaaacttttgagttggcgggaagaaagggttaacaagtggtggaccagcgcgatctttttagagtcccagccggctgtcgaaggctccaggtacacacacacacgcacacacttacacacacacacacacacgtgcacacacccctcccaactgttcctccttgggtcggttacttagctgaagggcaccatttggctttaaaacaaattacttcagcgccacagggagtttatcgcttggagggaacttgtaacgcgggagttcagggaaatccaagaggcgagggctcccacctccgccgccagaggaaagtaaggaatcaggtggtggccccctatgtgtcttgcatttctctgcacackttagcaatcaagttaattgaattcattggagtttagaaccggcctgtagctcagagaaggctttgaatggccaatttctctctctccctctccccctccccgcctcccgctcgcccgcccgcccgcgctcccagttccctcccctcagggttccccagtccacacctccctctccacttccctcacccccccactccctccgccgccctattaaaacacccaccagctcacttgttaagacccccttaagttggaggaggcagaagggcaacaacggcggggaaggagaagtcaagacgtctggaaagaattacccagtcctggcttcgagcagcccattgaaccagagacttgaaacagccccagccaaagacttttctcccaattctgcgcttcctgggttctgctgagtcttccacaggcttttttttttttttttttttttttaagacgaaaaagagattttctgttatcgggggcagaaagactgaagcccaaaaaaaaaaaaaaaaarraaagaaaagaaaagaaaaaagaaaagttaatttatttttaaagcawawtttttttaaraattagactgaagtgcaacggaaacataaagagaatattagtgaaattattttttaaagtggggaagaatcaaacatttaagactcccctatccttyttaaatgttgtttttaaatttcttattttttttggccggtcgtctcaaattcatctgatctcttattacctcaattttggaaactgcccgccaccgaccctccgggaccacacagacaggctgaggacgactttatgaccaagagctgaacaaggtacgttacactggcgcgttttggtgaaggatgaaggtcctccaacaggccagggagaaggaagacatccttataattgttttaaaatttttaagccagtttcgatagaaaagttggaagtttaaaaatttccaacagactgaagatcagggaatatttcaggtcactgtcaggcttagcaacatagccctcttttcccatttctgcggctctcgccagaaatccgctgcctttctggggacacaggtagcctctctgcctgggaaaggctgcacgtcctcagatgtacttttccattttgcatcttccggagcagcagaggggctccagagttaggaaacaagaattcccaatgtaaggaaaatgcattctgcacagccgccccaccccttcccttctttttttcccacacacacacacacacacacacactgtggggagaaaaactggaatagcccagcgcgttttacttctaagtgaaaaagtcgcttcttgctgggaatgcaaagggttaagcaatctgggcttccagctccgacaagctgggaccctggagaaggagggtccttctctacctcctcgcagctaccatcccctctcggccactcccccctttcccgggcctcccctcctttgcacttcccgcaccccattaaagtgtcaggctcgtcagtctgggcttactcgggccaggggtccctgacgcaggcggtggcacccgcagataggagcgggaggagggcgcgcatccctcctctcctcgccgggccagcccsccggccgcccggaggcagggcgtgcgtggggaccgcgcgctgcgcttcggcagctgcggcgtccccagagccaattccgacgtggcaccgcgcacgccggcgcttctctcctcagctgcagctggggacactgcccggtgggagatctgggggcgccgtctcgagcgcccagccgatgaasggggcgaggggcctgtgggagctggggtggaggtgggagggaagccagaggctgggttgggatggataatcaacaccttggggggaattcgtcacggcagttcccgcccagcgtgagccagggctccgaaatgggtccctgtgaacaggagggcgggtctgaaaggagggtctgtatgagggtgagaaccgggaggcgaaagagcctttttcctctgaccacggaaacgcagccgcgggggaacggcgctgaaaggataattaaagctgcaaagaggcgctgggagcacaggggcggtgcctggggaggaggacttgcaagacctgtgtcctattacacagtcttaggtgccagttcccctagcgcctctccctccgtcccccaaacgtccgcgctgaatacttggactcaaggacaccgcgcgcctctggggcgaacgagctgcagcagcccagctacgggagggaacgtgtagaagccccatcagcctctccctgcccactccctcacccttgggaccgttgctgcctgttgggtytcaggagcaattgcccagaaacgcgacgctgctccaacccacgtgtctgggctgggattgcctttgacgtcacacacgggggaggtgtgacgcaatagatagggaagccccgattggccaccaagggcttcccccaactggaggcctgagtatatatagaccatcagctcagtgttagaataaagagaaggaagttggtagatgggctttgctgaaggagtgaggccgcttgttaagagggagacaacttcactgctcattgtacattccaaggctttggctcagatttctcactgcggttaaggcatatgataagtacttctggcggtattaaaccaggttattatttttwaaaaaggttattttaaaaaggtcaacacatatttacatacacgatgccaggtttaaaattaaaatatgtatttccatagatccaagtccatcaacctctttgtagatacaatttttttatagttctatgacttgaattgaaaagaacttttaaattccaaatttttatttccttccaatgtgtgcaagttgactcattcattaaattagttttcaccacatttttctagagcttaataaggttacagtacagctgaggtactgtattttgagtacccatcatactccaccaaaagttttcccaatagtttggcgattcttttacattttcaatgacaatttaacactttaagttacctgttgcgtttatatattatgttttgtatgtgtttccaattctgggacagataattctgatttttaagtggacatttctagaacaaaatattgtaactaaagtatcatcccccctatttgttttttcttagatatcacctgagtcgggtaawtagaaaaatatattgtggacgtgctgacaaatgcatattacctgagttgcttgtactgtacccggagtcgaatccctttatcaaagaaagttatgcagtttataaaaattcaaggacttaacaaatcagtgactagcattaaactctaaggtcactttccataaagcaaagatatttagtcagctaccttcctggaaattgggaattgtgcaacaagtgaataagaaactgttactagaaagtaagttagttggaaccactcatttttgttaggtctgtagaatatagccccatagtattgaatttcataaatactttcccatacatggtttccttactaggtaagatttttaaaaaaawttttttcttgaatttttaaacacttacttgtcactggttcatttatttcctgttgttggcactctggggaaagtcctttgtctatggatcaaggtagacataccctttttcaaagctatattacacatttactttcaaagtctaagaacaagtagtttgttacattactagctttctggctcttgtatgaagtgtgatccctgagttaaagtaatgagaggacagagcataacccccatgtctccttctgggttctctttttatccatgcaaacccatgccgtgtttctgtcaatgacagagttggtggcagctggtatgccaacagagtggagggacagctacctgtagagaactcatttccatcaccccaacttggtattttatcctttcccttctagcagcaatctgtgtagagtattatcctactgcatacagccttaaattatttaagcatattttgctcatgcctataattccagcactttgggaggctgaggagggcagatcacctgaggtcagaagttcaagaccagcctggccaaaatggtgaaaccctgtctctactaaaaatacaaaaattagccaggtgtggtggtggccacctgtaatcccagctactggggaggctgaggcaggagaatttcttgaactcgggaggtggaggttgtagtgagccaagatctcaccactccactccagcctgggtgacagagtgaggctctatctcaaaaaaaaaaaaaaaaaagtctattttgaatggtagtcatgtggagttcatatatatactgcctttcccaccatctaggagaatgttactgatgagagtcaattaaatataacaaggccacactgttaaatattttcttatttaaattaagtaaatttattaatgaatgcctcttaactgaatacatctgtactgcagataattaaaaaatgagttaaaagtgtatttaatgaaattttaaaatatactgtaagacaaaatatgatctggcccataagaaacaacagctattgtttatcacatgtctagtatgtctcaggnnnnnnnnnnnnnnnnnnnntatgtttcaggcactcaactagatggtttacatacatatatctaatcctaatctgcaaagaaagttttataagtaaaagaactttgcctcagaaaagttaagcaattcactcaaagtgaattaataaggggtgtggatggaatttaatccaagaattcttggaatataatgcccttgaattgaattcatgctaatttatgctgcagctgcactagtcaagttttatgggggttcaaattgagaagtcacatctgattgaaagagatcagtaaagatttcctaaagagacttggcgtttgtgctacatttggctctgtaggtagggttttgacctatagatataattcccaggagccaatgtaggtacatataaaactaagattccatgtcaagtcatttggtaatttttttcccctacactgtgaactaagtttaggatggtgaagttcaggaaccagtagagcagttggaagaacacacatcctaaaaataatttattaatatagatggtgcaaaggaaaagaaatctgaaacctacagttctgaacccagacaccgctggagtgacaagtcctgtaaaaaaggcttgtatactaaccctggaagcttggctcaagggtctttgctaggataactgcagtgggactggagagaaaaaggcagacttcaaagccagagaggaagagaaggtcagaaggggagaagggaggttgggagggggagtcgggagggttcatgatttgtgttccagggggtaatgtgctgtaatgtgaagactgctgcggggagacttcatttgggtcctcctatctcagatttctacgtagggacagtagcagagggaatacacatcagggatgggtatcaatgtgaatgaggtcatgaaagtcttattttactttaacctagtggttgccaaactttgttatatagctgaattgctggaggagattttaaaacttgtgatgacctgggcacagcccatatcaatgaactcaaaatgtgggagccacagatcagtaaattttatggctttgcaggtaatttgcatatatagcaaaatttgggaaccactactttttaaccttttgttcaccataccttcctaatccactcagccagcagatagctaccacctgacctgagtatgtctgcttagaagcagatttctgttatccttgctagtgtcaccagcctagataaatattcccaattctaattatcatgcatatgatttaaggcctatggccccttctcccatacaacatgagtttatgcataaagacagcctatgttttagaaccagttcacgccttcattagataaacattctttaaatgtctcatcatcttttgtgcctttgtgtgtttaaatatttggccaaaagttgaaaagacactgaacttagacttcagtggatgaagagacgcaatgaataagaggcgcaagtgtactttacaacttaagttcaaagatattaattgaattgtccaaggacacatgacttattcatagaaccctcaagcggtttgtctgagccaggttgctaatatgaggcagagtgcagacttgaatccatttcttctgattcccagtcctcctattcttttcatcatgccatagttattacttgttaacccataagtaatgggttaagtggaaggagagtcagggttattaggtagttactggcaggaagctaacatcactaagatctaattgttgataatttctttttaaaatatgtacttagattccttttttaaatctcataatctattttatgagtcaatatgattagctccattttatagatggagaaactgaagatgacaagtgttgtataacttgctcaaggtcatccagccactaaaaggaagagccaggattctatcccaactcagtctggttccagaggtcaaattctctgaaattggtagtagatggcagagctgggatttgaacactagtataactgacttcaaaatatttgctaatctggttaatactagataatttatttagttgaagagacaagacatacatgcacacatgctcataagtcactggagccaaaatataaagcagcatatggattaatagacaataaacactgtaagggtactggaattcaagatgataaaagttgatgccccaaacttgaaccctgagctcataagatagctcagattgcaacttacaatccctgtaaatgctcttggggaccatctgccttttctatctttgctttccaaaggccttctagacctgttctgggactccccataaccattacctttagacatctgggtgaaaaattatggggatggtttcttaaaaaaaaaaaaaagactgtttgaggggtacccttaagggcttggttgtctctactacatattcattgcctctgcagtaaagattggggtaggacctgtgtctgtaagtctacattgactgcctgagtccaaatgggcttatttatttattaaaaatgtatttattgagtccctgctatgtgccaagccctggttttcatgcaaggacaaaccaaataattgaactacacaagctcccctggccatagagtatgtgcatgtgtactctccggccatacatatatatatatgctacttagaaaatcaagcaggttaaggggagagagcatggcagggggtgaagagagggcaagggtggaggagttgctttagaaggacagataagctaaggcctcccagaagaggtatcatcagacctaattgtagtctttcccagatgctgactcaataaatttgaattcatttcagcttcttccagatccaaaatggaaggaccactttatgaaaactagggtaactctggccgggcacggtagcacacacctataatcccagcactttgggaggccgaggcgggtggatcacctgaggtcaggagttcgagaccaggtggatcacctgaggtcaggagttccagaccagcctgaccaacatggagaaaccccgcatctcataaaaatacaaaattagccaggcgtggtggcacatgcctgtaatcccagctacttgggaggctgaggcaggagaatcacttgaacccaggaggcggaggttgcagtgagccaagatcgtgccattgcactccaacctgggcaacaagagggaaattcagtctcaaaaaaaaaaaaaaacccaaaaaaacaaaaaactagggtaactccattgaactcaattctcactgttgaactggggcagtgagagtagatgttactctcctttcatccaacatttcactctctgcttaatacaaaaaggtcaaggcagaggaaatggcttcgaggtccagtgacctgaagagtcccactggggtatatgagccaacggcaaggctgtatatctgctccacaggtggaagaagtgggaacactagtgccttttttatggtaacacaggattttggctgttggcattaggagcagaattgctattacatagatggaaccaggctcttcctttgaaacaaccacttttcatgtctctttaggtcgtttccacatagaaaatatatgagcccgaaatctcagtattggctagccttgtgtctgtacttgagtgagtgccaatttcccattttctataacagtagggaaacaattttcaggctgggtgtggtggctcatgcctataatcccagcactttggaaggccaaggcaggcggatcacctgaggtcaggagttcaagaccagcctggccaacacggtgaaacccatctctactaaaatataaaaattacacaagcatggttgtgcatgcctgtagtcccagctactcgggagactgaggcaggagaatcaattgaacctgggaaggggaggttacagtgagccaagactgcaccactgcactccagcatgggaacctgggtgacagagcaagactccatctcaaaaaaaaaaaaaaaaaaaggtagggaaacaattttcaaagtttgtttctaatctttccttatacgatgacattttattagccagaaacgaaagaatgccacctattttgtcatgaggattcaaatatattcagcaaatttattgagaataattatctggccttatgccactgtgtggatccaactcctagttttttgactataacaagttaattaaatacccagagtcttggtttctttattatatgcatagttatttgtaacatgagattaataatgtgcttaccacccaaagtcattaagagtaaataagattatgcttaaaaaaagaaacttgccccactgcctgaaacctaataaatgatgaataaatgttagccaccattataataatgatgatgatgatgatgatgatgatgagtaaatttgcactcatgcattcaacagatatttactgaacagcagctataagctgggcagtgttttatgtccttgggacacgttagtgaaaacagattatatatctccattgactttgtggagatatatataatgatatacattatagtatagcaagctgttctttaacacttggtttggcctaattctctggagaacacaagttagtaaatatttggtatcaattagtaggccaaagtctcatactgggggaaaaattaaaattttaattttaaatatttagagagtrtagatttcaaaatcatctttctacctagtagtaagtacttataatttaggattgaactaactctattttccaatttaactatacagtcatatgtctgacaaggagagtatgcttatgaaacagagtatttgaattggggattgtctcagaaagtctaacacatggtgcccatatcaatgcaattgcccaggggaaattataaagaaacacgtcctatgtgtcactccctgagatcaatgtattccctcagcaaagctggctctaaaatgtgccttttgccttttggtctgtaccaagatgctgtgtgtgccatactagacaacactgagatatcttgcagaaatataaaggttcacttctagccacgttgctgtggtatgctagtaaagtacttttcccaagcttcaaaaggacattctgtagagtcttatgatgtaagagggtgttcccacttcagctgtggccagcagatgctatgtcaacactctctatgtccacgtgtgctgataaaagcaaggaaaatgtgaataatggaaaagaatggcaggcagttcttttgctggctatggtgattttaaacacaagctaaatacacacttaagcttctccctggcaaagtgatttagtccccttgaaatttttcactcttgtgagaatgactcacgtcttggaaatgacaagttccaagtctggtgctcccagcaccttcaggcattggttaatgtaccatgtgggagttttcagcatcccctcagctgtgttaattaacaagagatgcygtacttgcctgcctttcactgaaaactcagcatttcaccattccccaacagtctaaactttccacttgggttaaggttacatttatcagactcctgcattacacgctatggtgtcccatatagttgctagaagtggaacaccaattttctttttgttgtgtttgctttttcgcttcctggttaactgatcctttaagctgcaatgcatttctggtttttaaaaacactttcataaacactgttccattttgctcctcaccacagtcctgtggggtctttgacaagttctgttatttccatttaacaacaataaaaaagagacgtccgcaagctagaatcctgatgtccagggcactttgcattatttaagttatactagtgcagtacaccaagccccaaatgcataatggacaaacaaaaatccagaaattattttgtgccaacgtaagagtccttggcaggtattcctgtttggtgggtggctccctttcatatggcaatccaaggaccaagctccatctatcttggggctttccaattccctaaaacatttttaatatgtgtatcaagcctgtggaagggccagagagatgagaggaggtatattctctttcttaaaagatcttactggaagtggcatatctcagatttccaaagcctggaatgacttggccataccaagtctatgctcaggaaggaaaggtaacacaattggtaagaagccacactmaggtttcccaaaagtacagtgcagatccccttaggaccttctcaatgtacaattgcagggaatagcaggtgactgtgtgaatggtgcctcttggagctgagcaacgtggtggccatgcagctgttgatagcctagaggatactgtgtgaacagtcagtgttaagtttgcatgtggattacgaaattataaatagcacatcaagcaaaagattttgcaaaggtaattgcttagtctaagtttctatttaaaataaacttatttagcttttaaaaatcaattgaattaaagaaaaagattaagcactaaatacatgtaaatatgagaaaagcccaaaaatggatgcgaatgactaaagatgaagatattgcatttataccaattatatcttctttgatagttcatccttggaagaggaggaaaataaaactccaggaggaaagaaatgaaataaaaagggttgccaaccaccactttaatgctaagcattggaaatgctttgggaaatacaaatcctttgggaaatacaaatgttttgggaaaaatggtccttttgtccttgagttgtttaaaacttttttcaggagatagacaaaatttaggggtgactgcaaaactgactattactgagtggaaacgtgtttcaggtctaatgtgctatggcttttaacaggatggaaactcacttgctgaaataaatcatgatgttatttgtcctttaatgtattcactatttctacaaacatttattgtgtttactgtgttccagtaaggttcatgatgctcaggatctaatcatctagtattcatgatggcggatggaggagagagactttggaacaaaggagtataattcagaattacggggctttaatagacatctatgcagggtacttagggatggaagatttttagtgtcagtgaggacttcaaaaatactcaattctaaaatccctcatttaacagatatttttacaaaacaactgagacccagagaggtatggtgactcacccaaggtcacacagttagttaatgagctagtactagaacccagtatcctgatctccaatctcagctggctgcagggaaaggatgtaagttgaagaatacacattggaggtgagattaaattacacatgagaaatttagcaaaatctccagtggatttttttcactggccaatatcaaggggtgaggggactatatagaagaatgacttctttgggtgttagaaacttcagggtccctgcctggctatgaccacatatatnnnnnnnnnnnnnnnnnnnnnnnnnnnnnnnnnnnnnnnnnnnnnnnnnnnnnnnnnnnnnnnnnnnnnnnnnnnnnnnnnnnnnnnnnnnnnnnnnnnnnnnnnnnnnnnnnnnnnnnnnnnnnnnnnnnnnnnnnnnnnnnnnnnnnnnnnnnnnnnnnnnnnnnnnnnnnnnnnnnnnnnnnnnnnnnnnnnnnnnnnnnnnnnnnnnnnnnnnnnnnnnnnnnnnnnnnnnnnnnnnnnnnnnnnnnnnnnnnnnnnnnnnnnnnnnnnnnnnnnnnnnnnnnnnnnnnnnnnnnnnnnnnnnnnnnnnnnnnnnnnnnnnnnnnnnnnnnnnnnnnnnnnnnnnnnnnnnnnnnnnnnnnnnnnnnnnnnnnnnnnnnnnnnnnnnnnnnnnnnnnnnnnnnnnnnnnnnnnnnnnnnnnnnnnnnnnnnnnnnnnnnnnnnnnnnnnnnnnnnnnnnnnnnnnnnnnnnnnnnnnnnnnnnnnnnnnnnnnnnnnnnnnnnnnnnnnnnnnnnnnttaaagttgtcatggtcatagatgggaactcagaagatgacctttacatgatggacatcttcagtgaagtcatgggcagagacaaatcagccacttatatctggaagaacaacttccacgaaaagggtcccggtgagacagatgagtcacataaagaaagctcgcaacacgtaacgcaattggtcttgtccaacaaaagtatctgcatcatgcaaaaatggggtggaaaaagagaagtcatgtacacagccttcagagcactgggacgaagtgtggattatgtacaggtaggtctccacattcctgccagggcaaacatacatttaaataaagccgcttttgtatctgtccagtcatatgctatagcccatccttgtcccttctgaacacagtacttctttcagttcatttgaaaacagcatgactgttgaaagcacattttgaaaaagggaaaaaaaaacttgtaaaactgttgagactatctatgaacatgcttaatttgtgctgtgttattggttaaaaatcaggattattttgacaggagacccttccttcccttctctccccctcttttaccttctctgcccccttggttctgccaagtcaaatccaacatcattttccacactctaaaactctccagctttgtaagaaaatagtgtctgcctgagcagaagggtcttgagaaaatctgcaggctgaagggaggctataaaatgtttttcacagagactgcaaaatgaggcaaaatgagggtggtgagaacaattttcatttaaaagagaaaaaaaaaattaaaattgagagaaggaaaaggaaaacaaaaaatgagaaaaaaaaatcttcgagcaaaagcaaagtaatgtttatttcactctccaaacagcattacctcactcactgcaacttgacctttgaaagcatttgtgatggtgtttgcctgcatgaaaattagacaggctgtgtctcccattaatttcctgaaagctcactataggggttctcctctcctggttctcattgaagcttccttctttagaacattagtagggtccctgtgagtttctagttttaattttctgcagatactttataataattagattttggccatgatggtattgagaggggaaaaatgtctccggtttaagaaaggcactgggatgttcttcctctcctctagaatttctagtgaaattctagtttttagaagaygcatcctattctttaggatcctttactgccacagagtcatgcctagtggttgtcargtagtgagataggaatggacattggctttagagtcagttgaccaaagttctaatcatagagattactagctggttgaccgtgggcaagaccacctctctgagtctcagtttctggatasaataaattaatgtgttccaagtgtttagcaaaagttatttatgatattatcattgatataattaaagctttttatattaatattgttgtttattatcatttagtccttgctcaaattatagtacctgtcaattgccaccatatgactaatttcagttgatgtctgaagagtttagagacatttcttcattatgttaatctcccttctagacagctgggagcatttctctgtcaagtttctcctaatttctcaaaggtaaaacttccaagttaaggtagtttcagttatctttggacatttggtatttacatagtacaactttgggcttagatgagaggataataggctattttcaaagggaaaggatgactgagaacttatagaggatatgaaaaatgaagttctggrctttaaatgagaaaacatctgttttgatattttgtctttaattttagttaaaacaattgctacatttgtcatttctaatcaaggcctcattgtttgagggttttttcttccttttctttaaacatgctcctcccaaaccctcttctcccatcatttttgttttgaattttgtttgtatccttggcaactttatgctgtgcctgtccaggaaaaaaataatacaaaatatgaaatattagaataggcctcctgctagagccctaatcaggcttgagaacttttcttcctccaggctgagataggggaagtctccagatacactgacccgaccagcagcttttaactaggccctgatgcctcctgggactctcagccagttccaaacactcacacaggagtacaaatctcttagcattctgaaactggtaattccatcttttcatccctcagtaartcccctgatatttaaccatgtgtgacctataaaaatggcaatttcctaaggttcaattcacaatactaaccactcccatcctctattctaagtgtcccaggatttgagaattgcaaagcagaaaccacagaaagacaactaagggaaaargggtttgaagatgttggctgctaagcattacaagtgatggaacttggagtgcaggctggttagggaaagaaggaaacaaagttcaggtggtaatacacaagagaaaatgggggctggggaagaaattgaccatgcttacaaacttgctggagaattctgcttaactgtggagagagatggccaaaaggattggtttccagttgcagccgaatccttggcactcttcagcactcttttcacttggtcttgaatagatgccttgcttattgctctcatagcctattatttcataccttcaccactttcccaaaaccctatccaaactcctctctgcttaactactaacagatgaccttgcctcctactaaagagaaagtcaaaagtactaattctgaatgctgtcaagatcatctttactctcttcttaaactgtttcaagagtatccaacctcacttcttgtctcaaagttattcttttgatctagctcttgagaccactgggcctgcttcctcttgtctccttgggaataaagctttaacagctaccagctctaactctgtctcagctttcatctccagtcttctctaccgactgctctctcggccctgtagctgttcaaataattaatgctgacatagaacagtaagggagtcactagtcacagagaaacccagtgtggtagcaaatttatctgatgatgctggtgggtactttcagagataaagaagatagaaaacagaggaagggaaaaaataaattgagaaaagaagttaaagagggccagtgtggtggctgacgcctgtaagtctagtgctttaagagaccaaggcagaaggattgcttaagcccaggagttcgagaccaacctgagcaacttagggagacctcatctctacaaaaaaaaaaaaaaaaaaaaaaaaaattagctggacttggtggtgcatgtctctggtcccagctactcggaaggctgaggtaggattgctagagcctgggaggtccaggctgtactaagccattatcatgccagcctgggtaacagagaaagatcctgtctcaaaaaatggaaaaaaaaaaaaagttgaagggaatgaattttttttaagagtgacaaagattttcaaaattcagaatcaatgtattttctagagaaactttgttttaaaaatggatagattctgacctgttctgagtatggcttaatgttggacaaaagtttgtacctctttgaaatagtgtttatactggcttttttatttacaaaagtaacacaggcttatggcagcatgttttaaaagtattaaaaaagtacaatgaacaaaattaaaattatcttaaacaaatacccaactgattgacactttccaatggtatatttttctgttttttcccttgtttttagaacactttgggattatgttaatgttttatattttttaagtagtgttatcagaaaacgtaaaatatatttggatgtctttttttttttttttttttttttgagacggagtctcgctctttcgcccaggctgggactgcagtggcgctatcttggctcactgcaagctccgcctcccgggttcatgccattctcctgcctcaacctcccaagtacccgggactacaggcgcccgctaccacgcctggctaatttttttttgtatttttagtagagatggggtttcaccgtattagccaggatggtctcgacctcctgacctcgtgatccacccgcctcggcctcccaaagtgctgggattacaggcgtgagccactgcgcccagccggatgtcttgattatataattgctttattcctgtctcttactgaacatgcgtattaccactcacgtggccaccagtctatgagacaaaggaaaacataaaacagtatcccctgatgtctgcattagggacttcctaggtagaaaatatataacaaatatgaacatcttctaagctggaagattatcggaggaaatgtcactattgatttaatatcacagcattctacatatccagaattctttggggaaaaatgtaaggctttattattcctaacagtagagttgactgtgattattactggattctgtatttgcaaatttgtctactcagtaaaacgtacttgtaaccctaaaatcaataattgcagtcagtaggtggtcatttgctgacaagcacacagtggcaaaaaatttgagtcatccaatgtgcatgttccagctgaggtcagacaaggtgatgctttggcttcttgtttcagcttttatactgtaaacaattatcctcttcatggtctctttagtgccacatttttcccttttttgtgcttttccttggtgatgtagctctttaacatggccttgaactgtaatgctgaaatgctatctaagcacaagaagactgtgatacacctcatggagatgaatttcctttaggcatgagatatcgtgctgttggacatgagttcaatattaatgaaccaactatatgtatattaaataaggtacatataaacagaagcacagataaaacaagattatatgttgtcaaaatgttgtggccagaggttcggaggaacccagccctgtgtttctgctagaagcacattttcagtattttccagttcagtgttcctggcaactttatgtaatacaactaccataaataatgataatcaactgygtatgacatttgactggttcctgttttgttctgtatagaaagcctgagcaactgaaatattctgagggccagtattgagaatagtaagtttatttttatctttcattttggaggttaagactaagagctcactgaaataagaatgaggaaatctgaattctatacccaactttgttgtttacctgctatggtcctggccttaatgaatcatcaactgaggtagtagaccagatgatctctaagatgtctttcagctcaagattcttaagtcagtattggtgtaattcttctgacatcttaattatatctagcaaatactgaagctctgctagagcaagatcaaaagaaaaagggatatcagaattttcatttgttggttactatcgtgtgtctcactctcacttttaatctgccttttccccccagattgcttcttgaatataaatcttgatttaagggcaccattatgagcttccctgattcccttctttagaatgagaattccaaacatttggaataagggtccttcatggtttaagccttagaggtgacagcatttggtttctcacttttccagctggctcgtcacctttgttttgcaccttttataactttcactcattttcaactttgctaaaaaggaaaagagaataaccaaatgactcctttttttcactttaataattggaagagattggctgtctgaaggcaggaattattttataataatttggataattcattctactaaggaaggcttgtatattcctaattccttttaagaagaattacaaagaagtaccaaactgcacaggtgtctataatgtaaaggctttctgttggctagatttgagatcctgtaccataaaccaaattactacaagggaagaacctcctccccatcccccgttcctttcgcaaaagaaagatgatgttttcattgaggactattttttttttttctggaatggttttactcattaatttcaaaaagcttttgtagctctaaaatgtttagattttatgattttgtatttgttgcttaatttgaggctgcttaacttagctatatgtttatatgtaaattctattcatctagaattcacataaatagaaaatcaagattaaaaaataaagttatacaatcttgataaagtcttagaagtttgttgtaatattattaatgaacatgcactagagctttggattgatttttttttttttttggttgtatgagaaattttaaattgtatgtaatattccatctttataaagtcaacttctgtcctcactgttttgtttcccccaaatcttgcatgtattgtggcccactttttagtatatatgagttccatttattgagcatttactgtgagctagccattactaacagctttacatacattatcttattaacactagttaattacaacaaacttatgaggtagatgtgattatccatatttttcacctacagaatggaagcttaggaggtaaggagtctgtagtgaagaaacgagtccgagtttacataggtggttaatggtggattgggatccagatgaatttgattccaaggccttatatagtactttttttgtttgtttgtttcagtagtgtgtttgctctgaggttgtactggtaggagttcagggggaatggtagcatcttgtatttactaagtaagtatttgtggaattttttgttcctgccattacccctttttactagagaaattgggatgggggggtgatgcagaatttctatttacttttgggttaagttgtgggaggaagcaagaacaaatgctacacattctagagatagtctcattgggtgaaggttaagatgaagagtcaaggttaagatgaagggtgaaggttaagatgaagggttaagccttacaagcaggaaaaaggtgaagcctttttcaaaagagttttgatttattttcaacctgtttcctcattggaggcagccagagtaattaagatttctctcttgctgtgttagctgtcaatgccctttgaagtggtatgggaggaagtgaggagatccatcagtctgaaaaaaaaagacattaaaagtaaaacatggagatttggcattttagacttggatcaaggcatctggtagaatagataacagtatttctacaggagatttttatttagattgttgtgagataaattaactttaagattagtgagataaattagaacagacaggaatgctgtagatgcttccagataaatttgagtttgttcatgtggtaagagattctgtatatgtaatcaattcctatgttcctattagtgattgttgctactgagccatctatttgtgataattgacataatcctttaggtgtgggtttacttagaaagtataaaatattgaagactattaccttatactaatggaaatacttctctacagtcctttgtaattcacaaggtacttttatttgcagtgtctcacaaatgtcccatgatgatggcaaatggctcattcaaggttatagaagtagtaagttacaggacttcagactttaaggcttcttgatttcatgggtacttgctcttgtaataggcaaaatcttggctgaagaaaatctaattttttaatatcctacacttcaggctcttcctaacacagggagatggagacagcttttgcaaaatctactaaattaaaattgggcttcaaacatatttaatctcaacttcactgttatttttaagaaagcagaaccttccccgtgtaaccagttattttgaacccagggttggcaaactttgcttataaaaggctaaatagtaaatattaggctttgcaggctatatggtctctgttgtaactagtcaattttgctgttgcagggtgaaaagcagccataaatagtaagtaaatgagcaggcaagggtggatgcatgcctttctgagctttcctttctgatacagcatgcatccaataaaaccttatttatgaacactaaaattttaattttatataattcccatgtgtcacaaaatattctttttttgattttttttcaactattgaataatgtgtaaccattcttggcccatgacccatatcaagacaggtggcaggctggacttgaccagtaggccttggtttgccaatcccctgttttagataggggggaaatggagggaattaactcttggctggagtagtgaggcaggaagagtgatggtcttatgcaatttagtggatgattctgtggttaagactgaggtggctggttcttctaaataatgtcttcttgacatgtttcatttactcaaaagttggtgacttgcttcatttccatatctcctggtgagaaatcttataactagtgatcatgtggyttcaacgaattacrctgatacacttagtgtggccaaaaagatgtttcagtttgttctctttcctgtgtgcaaatgctgtcctgtactttttccttatgtgaggttcagttctccttgaactggkgcatgkctcccacagattgtaatccagggctaaatagytgacattcgtgaaattgcatacttgttaccgatgagtgaggagatggctagaaagcctgttcttgctgtatggattttaagaagggctaaaattatgctctttacaccctactgagtaaattcccttgtgtccatgaatacacatgctttcacaaactgtcaaagaccatggctttctagctggcattctatcaccaaacagcatccagtagttgaaaaattttaaagctgttaaatcccatggtaataaaccctttcccaggagatttctgagctttcctttctgatacagctaaattcaccatgtgaacaatctctctcagagaacttctggcactttgctattggaaattgggaggggcagggaccaattgaaatatgcagaacatcataaatttggttccagtgtagtcatttcaaagagccagttctcctggcttgcttgtgctcacaagcagacggagttatttgaacattaactctggattgccctcttcctgttgtttttagtcttattttagcctggttttaccttttccagcttgagtcaacagaggtgggtgtggtaataaactcaggatgctggaggctaaagatgagttagaatttctgccttcatgtttttctagcctcatcacagacctcctgcccacctggtagccacatacaaaccagggatagacagggcatgggagaggcaaaacatcannnnnnnnnnnnnnnnnnnnnnnnnnnnnnnnnnnnnnnnnnnnnnnnnnnnnnnnnnnnnnnnnnnnnnnnnnnnnnnnnnnnnnnnnnnnnnnnnnnnnnnnnnnnnnnnnnnnnnnnnnnnnnnnnnnnnnnnnnnnnnnnnnnnnnnnnnnnnnnnnnnnnnnnnnnnnnnnnnnnnnnnnnnnnnnnnnnnnnnnnnnnnnnnnnnnnnnnnnnnnnnnnnnnnnnnnnnnnnnnnnnnnnnnnnnnnnnnnnnnnnnnnnnnnnnnnnnnnnnnnnnnnnnnnnnnnnnnnnnnnnnnnnnnnnnnnnnnnnnnnnnnnnnnnnnnnnnnnnnnnnnnnnnnnnnnnnnnnnnnnnnnnnnttttattttttattttattttactatttttttgagatggggtcttgttgtgttgcccaggctggtctcaaactcctgggctcaaacaatccccccgccttagcttcccactgctcttcctaacacaggtgttagccactgcacccagcctagatgcttttaaaaatgttgggattccttagttactaatgtgaaggactcatgctacatgtatctaacgtctcctttaattctgagactttatgcttctactaattggttaatttcctttttttttttaaattcaaaactggtatatcaaacactattttctgtgagacagggtctcactttgttgcccaggctgaaatactatgtttatagagtggtttgcaggactgttaaataatttattttgatattaaaaaaaattggctaaatcttgattcagtccaaccagtacagtctgacttgatggcagaataatgggaatagcagataataaatactcagtctctgccaatcatgccattcattgtctgaatggggatatcaagctgattaatcacatgacaattctgatcaatttatatttgttaggactttgctgcatttagcagaaaataatatgtccaattagtaaatgttggagggatagggagatggggactttyttttcctactttttttctatttctgattttctctgatcatatggaggaagctccattggcaggtataacccatcagccttttccagctgttttcattcctttcctaagagaaaaggagtgacttaatcttattagtgagtgtggaaggaataaggggaagcccagctctttctgcccggcttttgggagtgggcacccccccaggaacaggtatcagctgtaccttttgaagggacatacactgtatctgcaggaggctagtcccactgagaccctctctgggactgagtagttctgggaattactcagaattatgaagcccacttttccacatataaagccctattctccatatcagctttgtaagcatacaggtaatagtttggttttccatttgctttattatttttctgtttaacttttcagttgatttggaaatcagtctgaaaagaaaagcacagtttatagccctgtgcccttgagactccaatagaaatatctattaggaatacacagttataaactaattccaaaaattttcttgaagttgtggttggtctagtttcggacttgctttttttttttttggctcatagaaagattgtgtttaaaaacaacaatgggcatttctagaatagcttaaagtgatttatatccacttttaaattcagagggccagatgaacacttaatactttagaataaaaaggtgttgaaggtcctgcaaatccccttcctgatacaatgtcatttgctaagcccgggtcatatggactttagaactatacaatctttagaactacactattgctttagaattatacaatcctatgtaggagaattgctctcctgtcatttatttgccatattaaaatgaaaggtaaaatcattactaaatatgtctcccttaagaaaatgtcatagaattttcttatcattcagacctgaaagacaaaaaggcctaaaagccttattgaaggtaacaagaaaacatttttttttttcttaaacagacctctagggggaccaaccattacagtttgccaggactgggggttacctgggatgtgagactttcattgacaaaattgggagcatctatggcaaactgggacaagttgatcacgctacaagtcatacttagcacatcacttcagctgttctacccagcaatgtcattaacttaaatattgagtttgctgaaaaawaggctctttgtattggccatgatataacaaggcctctgttatcatcatgatacttgcttactgaggccttgtgacagtaagatgaggacacagtatgtatgtgaaattttgactacagggaatgtatttatagttcttccttttctttaactcatttttcatttgcttctttgcaggtttgtgattcagacactatgcttgacccagcctcatctgtggagatggtaaaagttttagaagaagatcccatggttggaggtgttgggggagatgtccaggtacatggcttcactttttgtttgtttgttttgcatgaaatacttttaagagcacttttactcattgactcattgaacatacatttattaaacactaactctgtgccaggtgttgttgttggtgcttgagacacattaaaatgtgccttggatctgcttcactgcctcttttcctatgtaaattgaaatataatttagaactttcttgcttagtcctggggtataacccatttctgtagtagctgataagttatatgcaacttaaaataaatgtgtaatgatttccaccatatacctttgggccataacttaatatttcatgttctgctaaaaattatttcattacaaggattaagaaatagaagtatgagccgggcgcagtggtttatgcctgtaatcccagcactttgggaggccgaggcaggtggatcacctgaggtcaggagttcgagaccagcctgatcaatatggtgaaaccccatccctactaaaaatacaaaaattagctgggcgtggtggtgtgcgactgtagtcccagctacttgggaggctgagacaagagaattcttggacctgggaggtggaggttgcaatgagccgagatcatgccactgcacttcagcctgggtgatagggtaagacccagtctcaaaaaaaaaaaagaaaaagaaaaagaaaaaagaaatagaagtatggtaagaaattggtatatatcttatacctatatacctaaaggatgatcaatatgtggttgatttaaaaaaaaatctgagtcaaaaaggaataattaaaaaaaaacagagactcaagtttatactagtgagaaaggcaaagaatggataagtggttttccaatattgtccatcatttgttattgatgaagaaacaattaatgaaacaaatatcaatggaggtaatttgacatttgtgggatggaaaaatgtatatgtgaaaatatgtgaggattaataagattcccttgcaaataaatatgaggttagattttagcaaaaggtaagaaagcacatggaaaatagactttaaaatttagatattatcatgctatataacccattttatatatgtagtttgatagcaaaagcaaagaaattacattagaagggacaaagaaatagcctggtgatttttaaaaaaaggagctggmaaaattgagacagaggagagaatgtagaaatctagccaaaaaaagctgataattttcaatagcctttatataaagcattatttcacgattcaaatttgcaggaaggccatgggaaactctcctattgctgctattgcaaaaaaagtgtggataaaggagaggaaaagtaatagccaaggataggatcagtttgaaattaaccagcacaggaggaactggaacctaaaaacattcaaatcttacgtgttatgaaagagtgcctgggaaaagagtttagggattgagatctaaagcctaaaaaaaaaaaatctcaatttggccaggcgcagtgggtcacgcctgtaatcccagcactttgggaggccgaggaagtcagatcatctgaggtcaggagcaagaccagcctggccaaaatggcgaaaccccgtctctactaaaaatacaaaaattagccaggcctggtggcgcgcacctgtagtcccaggtgaggcaggagaatcatttgaaccaggaaggcggaggttgcagtgagcccaaatcgcgccactgcactccagtctgggtgacagagcgagactccatctctaaataaataaataagtaaatatctcaatatgataacacaacaaacagaataagaatagcagaaagagggtagaggatgaaatagaaaaaaatattcaccatcaaagaatcgcaacacatgcatacagcataacaaatagtaacagaatcagagaatcagagaaaacataaaataaccacgccaaaaagaggaacgaagccaaaatgggaggataaaataacaaatattactccaggtagtaacctcaggatggaacaggttttgctggaatttttagctaaagcttacctattacttatgtttttcttcttgcagattttaaacaagtacgattcctggatctcattcctcagcagtgtaagatattggatggcttttaatatagaaagggcctgtcagtcttattttgggtgtgttcagtgcattagtggacctctgggaatgtacagaaactccttgttgcatgagtttgtggaagattggtacaatcaagaatttatgggcaaccaatgtagctttggtgatgacaggcatctcacgaaccgggtgctgagcctgggctatgcaacaaaatacacagctcgatctaagtgccttactgaaacacctatagartatctcagatggctaaaccagcagacccgttggagcaagtcctacttccgagaatggctgtacaatgcaatgtggtttcacaaacatcacttgtggatgacctacgaagcrattatcactggattctttcctttctttctcattgccacagtaatccagctcttctaccggggtaaaatttggaacattctcctcttcttgttaactgtccagctagtaggtctcataaaatcatcttttgccagctgccttagaggaaatatcgtcatggtcttcatgtctctctactcagtgttatacatgtcgagtttacttcccgccaagatgtttgcaattgcaacaataaacaaagctgggtggggcacatcaggaaggaaaaccattgttgttaatttcataggactcattccagtatcagtttggtttacaatcctcctgggtggtgtgattttcaccatttataaggagtctaaaaggccattttcagaatccaaacagacagttctaattgttggaacgttgctctatgcatgctattgggtcatgcttttgacgctgtatgtagttctcatcaataagtgtggcaggcggaagaagggacaacaatatgacatggtgcttgatgtatgatcttccatgttttgacgtttgcagtcacacacaacaccttagttcctctaggggctgtacagtattgtggcatcagataatgccaccaaaggagacatatcactgctgctgggacttgaacaaagacatttatatgggtttattttcattctgccaaagtaaaacaatacatcaacaagaagaaactcagatttaacctgttatttctatgaaaatgggatgaattctttgtttatgcactttttccttactgtgcatccgcctgaaagtgttttgscctatatacctcactagccatgctttatgtgggttatcatggaagaaaaggattttggaaactcaaggaaaagttctttcaacctatacaacctaacttatggactgttttgatagatgataattttttttttttaggaaggattttctttttaactttaccaaatgaaatgccaaaggaagttttaaaggccgttggctgtgctgtattttgatataattgtactgtgtttttaaattktgtatgccaatcttaaagacaaattttgcatattctctattttacttttctgccaaaataaacctgttcttccttttttaaaataaaataagttcttaaaaaatttatacttaaaaaatcctgcccaaaatgtgaagcttggttgactgatgttcatgatagaaagaataaaatgtttctctctctctaccttttaaaattgaatagtttatttctgtgaaagaagtatttaaactttcaatattttaactttttgtttttatttcttttagaaaaggccaatatacctatcacactttggaagtaaaaatacacactttcgtgtgtacctaaaaaaaaaatcgttgaaaatcaaggccaaaggtagtgcaattttttcattaagatttaaaaaaaagggaatgatagtctttgaaagaaaacagtaggcatccagcactggacaaaacatgggtatcaaagatgaataatctttggagattctggcagtgttttcccagaacaagtcaagtggaaagtggagaaattatctgtataattttggacacatacaatgcagtttatcaaaggttttgttctgtggcctgaatttactgggtcctacctacacattgaacatgttttgcctgtcttttttttttttttcaacttgccagttcactttacatgttagtataatgtttacacgggtgagttggataaattataaaacatataaattcaaaattggcagatagaatcaccaagtatctatcctcttttactttcaaatgaggaattttgtttttctgaattacacagatcatcacttcctatttcctgttctggacctgtataaaaatgtctacacagtagaagtgacatcaaggtttaataagtatatcaatgattggcacatataaaaattgttgaaccacatactctgaacttggctaatttagttactgcaaggcctccattatccagttttattttttacacgattgaccttgccttgtagctggtgctgtgtagacctgtgttgaaaacacaatcggaatatatgaataattgaataaacagcattatggtgaggcagagacacatggagaagtgttaaaaaaaaaatgggcttcctgcctttctgcctcttttttatgcagtcatctatgttacatctatcctgcctaagaaaaagctgcacatcctaccttcagagtacaaaaaggtacatctgagactcaagactctcactgattggagagcttgtggaaaacaaaacacaccatgccaataaatgagatgaaaacttgagtttgcctttttaactatttatgttctaagttaagctttgataacattcaaatgtcaaattctctcattcttataaaaagttgaattaattgcctgtatttattttagcaattattcaatgtatttccagtataggatgtatagtataattaattttttgtaaataaaatatttttgataagattattgcctttttttctaagggaagggggaactttgttttcctgattataatggtatgaatttaggaagggggggttttaaaaaaaatgatggttggtaaaaaagaatatgtcatttaatgttacttattattaggtagaaatccctaaaactggtgtggtttgaaaatctggaaaaccacagagagaggagagagactgcttaattatcattacccttgtctataatctttttcttctgcttcccttgaaagcagcacaaatttagacaattttttaaattatagtaacttatagcaggaaaaaaaatcaaagatatgcagaaatatgataagcaagcttgtttatttcagcattattcagaaataataaaaccttaacctaaaatcaaatgatgagggcaataattaaataaatcatggcatttctaaaaaatgggacatcattagctattgaacacaatgttctcagagaacacgtggattttggagaaatgtcacattaaaaaaataaccattttgtacagtaacatcccaattttataaaagtgaagatgtttaaacatgattatctctaatactgggaatgactgatttatattctgtatatgtttttgtattttccaaatactataaatatgtttttataatcaggaaaaaaaagacaataaatatcatctttttaaaaagtgggttgggacatctaacagcattttctgattagaggaactttgatagtaattatctcattttacctcttatccctcaaattcatcttatttcccagttcttttgtgttatctgttttctaagaatccttcattacttttgtactgctacattataaactatagccactgaacattattgtcagataatccagaaatattgatggttctaaacttaataattcactgatgaagtcacttggtgacagtcttttaatgtaaagagccttaaagtatacattttaggactgggcatggtaacacacgcctgtaactccagcagtgtgggaggattgcttgaggccaggattttgagactagcctgggcaacatggcaggacccagtctctacaaacaatttttttttttaattagccaggtgtgggcgttgcctgtggtcccagctactcagaaggctgaagtgggaggattgctttagccccagaggtcgaggaggctacagtgagctgtgtttgcagtactgcactgcagtctcggcaacaagaatgagaacttatctcaaaaacaaaacaaaacaaaacaaaacaaaaaaaacccccacaaaactattcttaattcaccagcattaccaaaacaggcaacaagccagatatattctgcagcccataattaatgacccctgctctttagaaatctgtggacttatctgtaccattaagtactcacactgacccttaaatttttgaacacatactattgttttaggccctaccaaaaacctggctttattgattaagtaattatggccaggccccaaaagtttcctttatttattaccattttttaacgagggaagctgaagtgaaattttaaagaaaaattggggaactttattatttttaaagccagtccctttttaatggggggaaaatttaggtccccacctttattaacatcaaaactttggccctttctaactaaatgggtattcaattatttttttccactgtgtcgggaggctttcaacaagaattggggtgaatattttttataaataaggcaggttccgtgaacttttaaccccaagacctactggaaaaaaagnnnnnnnnnnnnnnnnnnnnggactaaggcttgcatgccacgactttggactctatgacgcccttttttgtaaagagccttatgtgtcattttaggactgggcatggtaacacacgcctgtaactccagcagtgtgggaggattgcttgaggccaggattttgagactagcctgggcaacatggcaggacccagtctctacaaacaatttttttttttaattagccaggtgtgggcgttgcctgtggtcccagctactcagaaggctgaagtgggaggattgctttagccccagaggtcgaggaggctacagtgagctgtgtttgcagtactgcactgcagtctcggcaacaagaatgagaacttatctcaaaaacaaaacaaaacaaaacaaaacaaaaaaaacccccacaaaactattcttaattcaccagcattaccaaaacaggcaacaagccagatatatcctgcagcccatagttaatgacccctgctctttagaaatctgtggacttatctgtaccattaagtactcacactgacacctaatttttgagcacatactatgttttaggcactaccagaagcatgctttatagattagttattatgtcagtcccaagaagttccattattattaccattttaagcgaggaagctgagtgaagtttaaagaaatttggtaacttaatattataaagccagtacattgtagtggtggaatttaggtccagacattatgacatcaagcttgccccttcaactaatgctactcagtatttcatccactgtccggcagcatcagcagcatgtgggaatttattagaaatgcaagttcgtagctttaccccaggcctactgaatcaaattctctggagaatctgtttaataagattcccatccaggtgacttttaaacacattaaagtttgagaagcattgccctaatctagtatcttatattgttcccttcaaaccgcatatcatttcgaagatagttattcattcaaatattgtattctcccattgaacttttctactttaatataatttatgggtgttggcagatatctggttttaactaagtttattaagtacctgttataggctgggcactgtggctcacgcctgcaatcccagcactttgggaggccgaggtgggtggatcacttgaggtcaggagttcgagaccagcctggccaacatggtgaaaccccgtctctactaaatatgcaaaaattagccgggcatggggacttatgcctgtaatcccagctactctggaggctgaggcgcgagaatcacttgaacccgggaggtggaggttgcaatgagtggacatcatgccactgcactccaaactaggcaacagagtgagactctgtctcaaaaaaagaaaaaagttcctgtcacgggcaagaaatgaagtggtgtacactgtgtctatactcaaagagcttacaattgagtaagagggatatttacactgtaagtaagagggtaattacactgggatttgatgtgaaatagaataatactctttatacagagtggcatgggatgtaaaaagaagaaggtgaacatgtacaattagcctcataacggcaggttttaagatagcctggtatttaggttgattctttaaagacgtgcaaacttggatgggaattaatgatttttcaggtaaaagaacatgaatacagcgatagtggtgtgcttttaatatgttgtcctttaaacagaattaacatttaattaaagtggaagttgtagttaaccaagagtgggacatgactatagatagtaaatttgaaggccgggcatggtggctcacgcctgtaatcccagcactttgggaggccgaggcaggcggatcaccttaggtcaggagttcgagaccagcttggccaacacggcgaaactccgtctctactaaaaatacaaaaattagccgggcgtggtggcacatgcctgtagtcccagctactcaggatgctgaagccagagaattgcttgaacccaggaggtggaggttgcagtgagccgagttcacgccattgcactccagcctgggcaacagagcaagactgtctcaaaaaaaaaaaaaaaaaaaaaaacaagtaaatttgaagatggacgatagaagaccataacacaactgggagaaatactagaatgagatatttacattacttttgatagatgacacacccatggaatttttggacagggttctaacattgtcataaaataaggcactttatgatgtttggtttcaaagatctcacagaaacaattgtgtttataattacgatttggcctgagcatgcttgtaataaactggtatttctctcccaggcacctgaccacattcattgtatttcttccaaggctgcctcttgctttacattctcaggtcatcgcctcttgccaattacccaagcactctcttcagctttgttttggtataagaagcccgcaaccagctagttattatagtcatttgatcccacctttgccatgtcattcaaattcatctctcatccttgttaagactttttaaatctcttacctgaactgttgaaaatacctcctgatggctgggcgcagtggctctcgcctgtaataccaacactttgggaggccgaggcgagcagatcacctgagctcaggagttcgagacaagcctggccaacatggcaaaaacccgtctctactaaaaatacaaaaattacctgggcatggtggcatatgcctgtagtcccagctactggggaggctgaggcaggagaatcgcttgaaccagggaggcagaggttgcagtgagccaagatcacgccactgcactccagcctggcacagagtgagactctgtctaaaaaaaaaaaaaagaaaaagaaaatacctcctgactacctttctattctccatttctgtttcatccaatggattctttgcatttctgttaaaattatcattctaaggcccaattctgaatacaaagatttaacttcacctcattgtcaacaaaagcattaaatatgtaagaaattattcaagactgatgattatctattttctcccttgcagtcctttactcctatttttcatgtcctactaaactagatttttttgctccctcttgaacacactttgcccttctcctctgttagcatttgctctcaattttaaatggcttttcacctttgcccttctcttttatctttgtgagagggtatttgctctcaattttaaatggcttttcactgttcccccattcttatacctacttgtc

SEQ ID NO: 94561 - DNA, 274869 bp, Homo sapiens
  misc_feature (1)...(274869): n = A,T,C or G
aaggtgacatccatgctaagagcaaaaagatgcatacaaagactccaggcaaaggaaacagtaagagaacaggacacctttggggaactaaatgaagttaagtgtggttgaagcactaagagcaagaggggtagaagtgaaagatggggctggagagagaaaaaatagccagtcctggagatgtttgccttctattttaaggcatttgagggtaaagcagagttatcacaaaattcaaagcaagagagtgacatgatcagctaggtggagggagaggggagggttgttctttgataggtataaaatttcaatcatgcagggctgagaggggattctggggacctgttgtacaacaatgtggatgttgtggacaatattgaactgcacacttggaaattggtgggagggtcagtcttacgtcttatgtgtattttttccactattaagaaaaagagtagcatgataatatttttaatttagactgatcacagcagctgaagaaaggaggcaaactacagctaagagattcagtgtctactgaaatcatctaggtgagggaggatggtggtcaaaatacgaaaacaggagtgcagcagtggagtgaaacagaagaaagttgagaactattttgttggtattcagtaagtcttgtttattgagaatgtggaatgaggtgagtgcatacatactgaatgtttcccacgtgtgatgcattgtaccaagtgctttgcatgaattacctttgatctacataaaatttggcaaaattttacttttccaccatattgtgaaagttcaaaacggttacataacttgttcaaggtcacagagataaaacatcgtaagtccaaagattttgataaagtatttttctgaaattttgtctaattttcttcagttcttcacttcagggggaaaggatttgttttataccaaaaaatgcctttgtataccataacaaaacaatatttatcactatggttgtgttttactgttttacttatttattttttaaataccagtttgaccaactacattgatttcacaaccccacaagtcagttggaacccacagtgtggaaaaaaactgatctaggaggatttcatacatttcatacatttagtatatgtggatgccactttcaagtattaattcatgagatttactgtgtatgcccctttttccattccctcattcaatttttctgtcaatcgcttcaagaaaggagtagcagagacaaactattctttccatctttccagtttttatttttccaaaaatgtatcccaaaagaaaacttaaaggttttagaggtacaagaagttacaaggaacaaggaaaaacagaagaaggcaggaaaagtcagatatgctcaaaaaacaaggattctcactagactagaaagcagttctctgcaactggtggggttgggtgaagagtctgtgcatcctaaataatggctttttggtatatcctggagaaggcacagcatcctaaagtagaaggacaatgtgctatgtcaagtaaatgggatcatgggcagacctgtacaaaggttcacctgtctacttgttgaacaaaagcaatgcagaatgctgctggacccacaggataggaccacatgggtaggaccaacaaaagcctaagtggtgacctttgtgaatgaacagtcaaagaccagaagacaagcacatgcatgagggcatcccccacacacatctggcactgcattagcacctagaactatagcatcttcctgggattaggagggtacaggtgaaagtcccaagaaggatgtgggttaaatgtctcaccaactgtgcagaaacagaaatacattgattctgaaagggaaagagatattttttatgctaaattaatgaattaagattaatatatgcaatgatatcaatgcgactatataaatgtatttgcattataatgtctaaaaagtgctagcttagtcaacataaacatcaatagcccacatggagaaaacagtaatagagtgaaatatttttaaaaataagtctgtgatattaaaatagccatcagatagatttttttaagaggataagggaaaattatctgctttatttcccaatgggtctgctcattttttgccccaagacttcatataggtaccaaattaaaatgcatagccaaaagaagatttagtgacacgactgcactagctggaaacccactttttctttgctttcattactgcttttcattaccttatgttactaatcatttctctcatggtgtgtgtgagtgtgtgtgtgtgtgtgtgtgtgtatgtgttctttttattttaggacttcagtaagtaaagtcttaattactgatgtcatagttagctcatcctctagttaaaccagcatcaagagaatcatcttttaagaagaaaatatttaagtctatctcccttgcagttttcttcttctgactgcctgatggatgagctatgcctttcttgtctcagaattgttttcccactgatgagacactcttctccttccaggcaccagaatctaatttaaactagttcctgtgaagatccaaaatgtctacaaacattttttcctgtatttttcaaggcagagaaaatataagataaaagtaacatagacatcttctgtattctattgtgtattgtactgcattccagatgaaatgtgagtgcaaagtttttaattcatagaacttttcaaagatgatccctatgtatctaagacattgacatttcctggagtgctgtcaaagcagctgatacttttgatatttcctaagagtaattcttccaggcaaggcaggcatgtaatattcctttaaggattttctactttggaagctgctttgtcacaaacaccctccttccctttggaaacaggatctctctggtttcatgtccccttcctgaactgagtccatcttttcttttacatgtgaatattttatatgtcttcagtaagtgtcagagtttctatgcgtacttagcaaaggttatggctcttaaaaaatttaaattcatatattaatataatcaacctaggaagtcaaaggtacatcaagggagaaaacaaatttccttttcttaaacatatctactgtaaatgtggccaatggtatgtagcaacatcactaaacaaataagttattttccagtgaaacaataggatatttcccccaccaccacaactacctaaatgaaataaattacaccaagttaagtattttcgttaaactcaattgtgaaagtctggtttttttctataaattatagaaatagtgtctaagttttgaacagaaacagaattagtaggccctccattcaaacaataaagagttctactaccttcatctgcgattcaggctcatcctaacagatttctcaaagtctaaatgtctcagaagtttcttatttactttgcctttgaaaactcaaaaaagtgacatttttatttctatcagttactgactgcttatgacagcatttttattgagcatgtggatgtcagattcctgcaatacaactttaagcattggatttaaccacgagatcctgggcaaggtacttagccacatgaagcctcggtactcagtatcctagtcagtaagatggaaataataaaatagagaaggacctaattcacataattactagaatgattaaatgggacatttgtaaaaaatcttaagaaagagctgacacctagtaggtgctaaatcgtggctaacattattattatcttattatctctatgtaaattatagttgctagaagttgggggatatgggcccaaggaaaatcagtttttcgcttcagggagctcactgtttcatggggaggagtgacagatacatacgccaatggctagtccctgtataagggaccataccaaaagtacccataacagactattaaacagagaaggaagtcattagttctcaatggggatatcaggaaagttctcatgcagagacaacattgctcaaactttgaaggatgaggtaagcaagtatattcagggaggaatacaggggaagaggaggaagttgtgtgcaaaaagacactgaattgttaaaacgctgtcctcagatcacagtagagaccctgccttaataaatatgcagaggataaatgaaagcattatgaaagatctatcatagcttcaaaagaatgtgtggacttctcttgattttttccctttcactctctttctttctttctttcttcttctttctttctttgacggagtttcactcttgtcgcccacgctggagtgcaatggcgtgatctcggttcactgcaacctctgcctcccgagttgaggtgattctcttacctcagcctcccgagtagctgggattacaggcatgcgccaccacacctagctagtttttgtatttttaggagatagggggtttcaccatgttggccaggatggtctcattctcttgacctcgtgatccgccggcctcggcctcccgaagtgctgggattacaggcgtgagccaccgcccccagccgacttctcttgttttaagtggctcttaatcatttggtggtttgcatattccaaaaagcttctaaatatttgtgttgaaccaatgctttcattcaaaaacagaatgcttcttgggctgaatggcactatgtcatcccaacaagaagaacatcggaatctaattgtgtcatccatgttcttattttaaaacaatctacggtaacacccttccagccatgaagcgttcagtcagttgaacagatgtgatgtgttctccctgatgcattagcttcaacctctgagttcatgaaattgagtttctttctgtagcatgctgtgttcattcatcagcctgagtcattttatctgattgggtccaatctccccctccttggcccgcctccttttgctgctgaataaatcatcctgggagctgtccaggttggagaaagattttcataggaaagttccaactgcatccagcccctcatttattcaggytgagtccttagggccccaaggagaaagaagtgagaaaataaagtgatgtcttccattgccaagtttgctaatatggtcattagcacagatgccttcgggcaatgcccgcagagagaggacacagctacccacacattctggcatagggtctataggacagccttcccagctgtgctccgtctgggttcccatctcaagttaagagactcattacccacccgagttccagtagggtgaggctgatgagtccaagaaattcaggaaggaagaagcaagaagcatttctttgacaggaatgtaattgcaggggttatttcattaagggctagataactgtaacacagagttgtttgaggtacttttacccttaacttccaggcccatgggataggccaactattctgggagatctttaatgttaacagattaattcatctacaagcagagttaaaaatagaatcagccgtctatctatttaaagttgagcgtttcattttggctttcttgggggatggtagaatacaacttaaaaggattgaaattaaagaagtcttttccagggagtgaacgaaattctagaaatctactggttagggattggggggaatattagaggattcttttctcttccttctggaattctgtgtgcaaggcaggtggcccgttttgggtttaacccgaagccgaaatgcgtggggagaaaaacaggaattaaaaagcaaagaattaaaccccgcgtttctgggacacggccgacagaaataaccctggagacagtgtatgtggttgggggtgggggtatcgaaattatttttccttaggacaggcaggagggaagggagcttctcttcttgctcaggagggactgagggggcggcaaggcaaggcggtcatttgggctttcatgggacgccacggggagccgcgaacgcgcccagggcctgacgtcattggccatcagctgactgtgctctgggcccgggctccactggctgcagccgcagtcttggtggaggaggtggggaccaccaccgctcctccacctgcatccggctgcgggactgcggcggccgcgtttgccctgcagaccctgcaccccgggacgcggctcatctgtcattagcaccggcactaagctcccaccgctcagcgacttggtccgccgcaagctccgccgcaggctttgtccgctagcgctcggctgagtctgggcgggcgggaaacctgggctagggcgaggcggggcccctggacatgcctttctccacgtccgcctcctcgaccctattgtaagcggagaaacttagtgtgcgaggcaggcaggggacgtccccattttgatgtcccgtaccctccacccccttcggatcgaggtagtaaagaggctcctgtaggaaactgactgcctctatgattgcggcctcttgggggattttgcgtttagcccgaaagttggctttgccaaaagacgcacgggtaggaagggcgaaaaggaaaccctgtattyygtcgcgctgggctctccgagtccgtgcgcaaagcggcctacgagtcctggctccgcacctgcagaggacaagagccaatgcctaaaaaagaacagcggaggaaccggctggcgcggccagctggaacgctggatcgcagtgcgcccagggaaggccgggggcgcccgccggccctagccctcagtggtcctctcccacgccggcccgcgcgtgcctctgcctacaagacctggggcgtcctggccagatctggatggcaggtccctccgccacccccggcccggttccgggggcgtggcttgrcgcgggggcgggtttaagtcaccgcgggtgtctgaccactctgacaggtctccaaatttctcccagtcgcctggcgcccgcggtgcgtttcagagctccagggtggcacgcggcggcgcttccctagatccagaggcgtctctgtcgacttccacgcggcctcgggcctcccttctcctccaaaccttcgcctcatccgccaagcttcggttctcagcctcagatatccgcaccggcggcttctcttcgttctcggagctcttggctttggagccctcaccactttttccttcccccgcctctcctgatcctcctagctccgagccaaatggactccaaagaacgaaataaaggggatgagaactgtgtgctgcgacccttcgaaagcacagctgaaagcgttgacstcgtcttatagctcaggctgggaccctggrgcgagagtccccacaccccctccgggagggatgcttctggccagagccagcgctgcgctgtcagtccttgctcccgaactaggaaagagcctaggagggagcctcagcataccccttcctccaaattaactatttggtgaattgttagcgccgaggctaccacctctccaaccctgtcgcggggcgccccgccacctcaccgtgaccccctcctcctccttctttgcccccgcccccagctccgcccctgctccccatcccggcgcaatggagttctccgaagggcgatgattccagccacatctgctaacttcgcacccatcgctgccgccggtcaccgccggccaggccccctgcagccgcggagcagtgggcgtccaaagcccagtgcagcagccaggacccgcccgacgcgcagcagaagcacggcgcccaggcgcttaggcrtctcttggagagcaaaggctgcgccaaaacgctgagcctagaatcaaccaaggagcctgagcccaggaaggggctgcgtggctcacagcgctgcggctcctgaggacaaatagccactgccgctgcgtacccaagctgcgccggytggcgggagagcagcacgcaaggacgccgaggtccgccgcgatcttccaggtgccctttgcccctgggcacagtatgacccgacctacagggagccctagcgcagggctcctgcaacggggcagcctaggataaaaaggatccttgccaagctcctaccaggccgcctttgagtctttaggaacccctcctccggctgcctccccaaggttctgggcctccttccctgcggcccagagccatggagctctccgatgtgcgctgccttacaggcagcgaggaactctacaccatccacccgacgcccccggccggcgacggcaggagcgcctcccggccgcagcggctgctgtggcagacggcggtgcgacacatcacggagcagcgcttcattcacgggcaccggggaggcagcggcagcgggagtggaggctcgggcaaagcctcggaccctgcgggcggcggccccaaccaccacrcgccgcagctgtcaggcgactcggcgctgcccctctactcgctgggcccgggagagcgagcgcacagcacctgcggcaccaaagtcttcccggaacgcagcgggagcggcagtgccagcggcagcggaggcgggggcgacctgggcttcctgcaccttgactgtgcccctagcaactcggatttctttcttaatgggggctatagctaccgaggggtcattttccccaccctgcgcaactccttcaaatctcgggatttggaacgcctctaccagcgctatttcttgggccaaaggcgcaaatcggaagtggtgatgaacgtgctggacgtgctgaccaaactcactctcttggtcctacacttgagcctggcctcggcccccatggacccgctcaagggcatcctgctgggcttcttcaccggcattgaggtagtgatctgcgccctggtggtggtcaggaaggacaccacctcccacacgtacctgcagtacagcggcgtggtcacctgggtggccatgaccacccagatcctggcagcaggcctcggctacgggctcctgggcgacggcataggctacgtgctcttcacgctcttcgccacctacagtatgctgccgctgccgctcacctgggccatcctggccggcctgggcacctcgctgctgcaggtcatcctccaagtggtcataccccggctggcggtcatttccatcaaccaggtaactcctgcctgccttgcatttgtttcccctctaacttccccgggttattgatcatatagcttccagagagccagggttgcctcactctctttaagtctccgccttcagtctggcacagtgccttgtacctaggaggtcttgagtgttagcggaatgcaatctcttcttaaagtggaactaaatgacctctaaaagtttctaccaactctacccttctactctgattctatgagtaattctactctgacatcagctaagaaagtctgctttctgctcctcattcccctccctcagggtctgcagtctccggagcaggagacagaaggggaggagaagcatccagatttagaaggtgacccattccttaacatctctcctcaggagagtcgcagcagggtgttgtagcaggctctgggcttcagagttgggtttttccgtatctctaagccacaaaccctcagttctcaaaggaacatacatttgttaaacacatactgattgtcagtgctgagtactgtacgtgttatgtcatccaatccttcaaacaatcctatgacacatggttttctcgggaattttttattgccttggtgaccaaacatgatatcttctctcatgacacgatgcgaccccagtgctttgaataaaccaacctcagtaattgggggtggcaaagaatgcaagttttgattaattggaaaagggcattttgatgtagatgctttaaatattatatttaggtggaatcttgttctttaggtatctttccctcctttctcctccttttttttctattcttccccttaaatatggatatgcttatgtgaacaaagttcacattgtctatggatgagaaagtagacaatgtttctattgtttaaatttactagaaccaatagctaattaatggcatggcactgtctttgcaaaatgtatggtaggtaacaggagagtgactttgggggtttctcaaaaatgagggaaacatgtcaagtgaagtgttttcaaayagatggctggtgtgagatgcatggtcagggggctgctttgtatgggcctgctctgtcgttagcctctgtatcatttttgctgtattagaagcttaaaactcctcttccttatggtcgaatttgaatagatgatgcttagaataaacaggcacgaccccactgaaaattgttcatgatgtttagattgccagcactgttagagtgcttcacccatcactggcctcctggacttctggtcaatgtgggatcctgtctcttctccaatggttctatattcctttgctcaggtgacttatctggttggctgcttttacagtgctttctgaagtctctctgggtaaagcaaagagtttataaattacatgcctgtgattatcaagcatgaaatggagagatgagagactctgagtaagggttgattgactgaactttttcttattaaagacaataatgagtgttttatcacagtcrccatgaaccttcatatctacatataacaaataagtctcaatctgggaagtggaagtcaaattctttggtattaactatttctcaatcctgtttacatgaagatctacatgccagtacatctaaatctactttcttccaagctctctcattctcttttttatttttctttgttgtatacatagacattagcagatcttttcttccctgtcttcctccccttcctccttctttttccttctctttgccttctctttttttcatctaactcactatgagttgttttcacgataaagcatagctatctgatcatgtataagaaattccatgtattataacccactacttttcacgcaatagcctttctcagtacacacaactagaaaacttaataagtaagtttggaatagtatttaraataacacatcctaagtggcaaattatgagtgttttcaaagttctaagtatagatatatttttcttgccaagtgaatccagaaagtaaattttggctccatatttgttttatattctactcaaatactaccagatgggagaagattaaaaataacccccaaatgtcttcccaccctcatctcatcataaacaattctccactgtgaaatccaaggtcctgatgcatgtaaactaagctcattcaattttttgtttgggtaagaattacagataaactacgatttcataggttgagtcaccttttaccaaaactctaaaagaacaaccagagcgctctcccctcacttcagtgctgaaagggcttttaaaggtcctttggcgccctctattggcttaagagtctttcctagatcgcgcagatggacgaagtagagaataaatcgctttttataagaatctgtgatttttgaataggtactatttagttttccatgtctggtaacacataaggaatgctcaaaacctgctaaacacttcttatagcaactcgagtaaaatcctaacttcttaccacagcatgcttgattctctgagctagttgcttcttctctctccaaccatatttccctctcttctcttctcttgtattctcttcattaggctccaaatatgctattcatttttgccatattccaagctcttcctaattctgggtcttttcacctgctacctagagcaacttttcccaagtctttataagactggcacattctcattgttccagactctcaaatgctactttctctagtaaacgacttgtttcattttctccagagcacatctgctatctgaaattatcttatttgtttatatctactatgtttctccccacaccctcacaagaatgtaaacaccataagggcaaggatgttgtctatcataaatagcattttatcctcggcctgtagaaaaatgccagacatatagcaggtactcaacaaacagtcactgaatgaagaagacaattcatcatataggaaatattataaaatatccaagtgccctgatgttgtgttggtgaaagctttctatacacacacacacatacacatcatatgtgtgtaacgcagtcttacacgtaaacatcttctaaagaaatcaaaaacaataataatcctttactttgcacagtattttacatgtaactaagcacccttatgtgcatcatcatatctaatgatgaaaaatagatggtatcatccttcattttcatttcagagaaaaaaatgacagaatcctagaaactttacagtgataccctgaggatcaggaacctggcaagtggaggacagaattcaaaccctgactctgatgccaattattcttcagaaaccctttagtgattatccttctaaacatgtaagcatttgaaactattaaagactgaggagtacttcttttactacttaagagagttaaataaacatttaacgaagaagccaaagggaaattatgagagaaaaatgagtgaattgctgggcataggctcattgtagctagctcatcattctgcttagctagatacaaatctgtcaactaaaagccataaacactggaatagcatctttctccacattaatcttcattctctttaggaggatagctaatgtttaacttagcattttcaggatttaggaaacgaaaatgggagtatagagttagcacaccttggcagctgtttcacttcactgaaaatgtcatttttgaaaggaacaaatgagccaatgattgccttcctttaatctaagctatgagaatctgctttccctctttctaccctgaaggaaatgacatctgtgacttgacagggtagcaaccacactgaaaatctctgcagacaccctatatgaagagacaaagccctgtgtttattgaatcaccatttgctttccactgtggatacaaaatggaacctaaaaggggccactcaggaaattccctgccatcagcaaagagatggtttatgttttctctactcaattaacacactacaaacattgacttcccacccaacaaagagattattgtctagagcagacataatcacccatatgttttctgcatctggagtggcatcggaaagaccgagaaactttcagaaggctcaaaacccagtttgaagggttccttttatttcactctgacttagctcagctataggtagcactagggctacaatcgtttctttcttatgaaaccgcacccaatccaagttaaataagcctcaaaccaatgataggaataccttgtccagattttcctaagacactggtttattttttccacatcataaaccaattgtttgyatcaccaattcgatttatccaccaggaaattcattacaaaatgatgttatatgtataaataaaggattgatgataagattatatttgctaggttctttcacaaggtagagaaattctaaatgctattgctatagttagcattttactctattttaattgctggtgacaataatatgagctatcttacatttgaaactcatctcattctcatactttagctcattagtgataagatggtggaaatcatttagttactggaaaactgagaggcagcaatatttaaccagaaagatcgctgcattatggttccctcttggggattctaaaatattacagctagtggctaattagttttctgtgcctcttggtgagatagataagcggacttgtcagagtggagatgatttctccaagataactgtacaatcaaaggcagtcagatatgcaaatccaggttacttagtgctcaaggtcatgctgtcagatttaaattcctcatgcaacattttctttcctacctttcaacatcctatcaaacaggagagactagagccagaaaaatgctaaagaatgattgttaaacttgacttacaatgagggacatttagcctaacatttggcctttaagaaatcctttaggggaaatttttttttctttgtgctggataagatagtggtgtatagtatgagtaagttgggttcaggaggggagctgactttctatgtgacttaaatacacatttctgaccacttaaatgaaggactgacttcacagtaaagataaaataaatataataaaattaccaacttctctcccatcatttatacagtttaaacataagatattatatgttctttgtctaagtctaaggttctttgtagctatctcaaatcaaataaagggaatcctgtgactacttaatgtacaacaaatggcatgtaatataaatcattccaatttggtagttggtatcaaggtacgtactcatttgagagacataaatatccattaaatgagtatgactggaatccaatttaatgcacctcactagttatggtgtgcatttcttaaaaccccaaatatctccatttctgtacatttttctttaggaaattcatataggctttaaaaaaataatgtcggctttccagcatgtctgagaaaaatgcctttcaaaagccgatttgagtgtcaaccttcccaagagattcctctgaacaccgagaaatggaaatattattctctcttacttgtaaaagatacccagagagtctcctttttctttctttctatttttcttttctttctttcttcttcatgtgtatgtgtgtgtgtgtgcttttgtgtatgtgtgttggtggagaatgggctttacaaaggatatcttaatgactgctgaaatgaccaattaaatcccttcagctctggcctgtagacatctttgccctggagttgcaaataggcttgttgtctctgtatttagagarttgtaaaatgattgtgtagtgtgtgctttgcaagattgaattatgaatttgttttccttcatatctggtaatatcacctgactgttatcagcaggtcagagcataattagattagaactgggaagattgggaggactttgcttctagagcagctgctacaatgtcatgctaagtaggacaaatgcattagtcatatttacactttgatgattgatgacattttaagagctcatcagaaatgagtgaaaccaagcaaaaaaatgaaatatttttaaaaagagtttattccatattcagtgctgctagcaacatttaatcagaggacactactacaatcatgctgatgtgacattttactgttgtctaaatatttcttaagatgctaatttattcatttcacaagtgtgtctatttaagttgattctacatgtgtttatttccaaaacataggagacacttgcaacattcatcttaaacctttcctctcagcaccaaataggtacaatattgattctctgggagaccagtagactcagaatatgcagctggacaacatagcagttcacttgacttatcacttctgaagtgtgttcttggttttctctttggggcagaattaaagtaacagaacatgaagattagtggcagtattgaaggttgcaaaatttctgtgatacataggtttgaacctcagttggcaaaagagtgagttatataaagaattttcttcccaggatttttgtggggacttagtcgaggaatgctgcttcagccagccacaacagagcagggaaagctagtataatcttccctgcacttccccaggaaatgtaattggatttacacactcaaattatatcatgtgagttttgtttatgaaggactattttaagaagtcaggtcacttaagcagtgcttcggaagccagrttttctccctgcaagattttttacagtcagccctgtgggggagaggaagaatgcagaatagattaattaacyatggagatgccagacattccacaggaggcccaggcacattctggtaggcataaaagccacctaccagcaaatgccactatgccactaccttctcgataaaggaacagagcttatctgacaaggtgttgtcagataaacctatgtttgcttgtttctttgatctctatgcactggactctgaatgtgcatgtgtagaatttgatatctgaatttcatttaactagatcatatattttaatatatgaaatactttgtactttatagctactggggttttctatccctttcactctgtttcctgctttatatatccaagctcaagtgctactaattgcaaaatgtctttgaagcacaaacttcccccaaattagggaatgataaagttatacatggtgaagacataagccggatatgaaagtaaatcacattaatgtcttggggtttcttgttaaatgagtaatgtttttacaactgccgtttcyatctacagtgccagtgtaaaaatttcacataaaaacaaaaaactataaccacttcattttgtaaacaacacatcctcattctatgtcagctgatttttcagttgactggagtaaaccgtttcagaatcttttcttcatttgtgtgtatgtatgtgtgtgtgattacacgctgaatgcacaagattgcttataaaatagaaactactaagggttagagaatgcattatcaaagtacatgtatttctttgactcagaatatagggagaagaaataagagcacaaaaaaaaaatctaacagaacccatcttatgctgctataacaaaacctgagactgtgtaatttattttaaaaaaaaatcagaaatttatttggcttctggttttggagaccaggaattccaagactgagggaccatatctggtgaaggttttttgttgcaatgtaagatggcagaaggtatcacatgggcataaaagagcaagagattgaactcaaggcctcaaacacttttaaaatcaacattaatcctttcatgaaggtaaagccctcaggatctaaacacctctcattaggccccactgtaacrtttgggattaagtttccaacacatgctttatgaggggcatattcaagccataacaaggaccaaaaacaaaaaacaaaacaaggaagaatacctctggaaggcctgaacatagaagggatatagaaagaatatggtgactgcctttaaatatttggggttctgccatgacaaagagactggttattttctgtgtgtctcctgtggaatggaattaagaccaatggatagccattaaagcaggagaaattctgattcacaaaaaggtaaagtttgataacaaacagacctgcccagggagctgctttttgagatgatgagctccttgccattgggcattccccaaggagaagctgtgcaacaatccatcagggatgtaatcaaggagattcctatatagtgatctatatatctattcctatagatatataggaatatcctatgtagggagatatatacatatatattcctatagagggaatcctttattatatccctgatggattgttgcacagcttttcttcaaggtcagttgaaagtcattggctgcatctcatgtcatcatggttgctttgcaggcatggaaaagtagaagacaaagggcaagaggccaaaatggtaaaagggcataagccaactgaatttgtgcccctttgaggagctcccctgggatctctgcccaataagacctccttgtatttcaggcgacataattagttctatcagcaagaaaggatggccaaaaaatgattttgctgggctttaaaagatcaggattgcattagaatgaaaggtggaataactattgaatagataaacttttcccccaaatatttgttgactgcctgctgggttttatgtcctagaacacagctaggtactaaagagataaggttattgatgtaatggagctgatgcttggatggatttgggtagggaatttgtgactccactgcagaggtttggytggaggttcacacctgactcttagaacacatctggagcacaggattcagggattcagtaaatattttacacaaatgcaagacttggactctttttactacagacctctaaagtatgaaacatcaaagctgcagtggatttcttttagaagttacatgaaaggaaaggtcagactccagaagaaatagtggaagggtatggatcttcctccctggtgaagaaaagaagagcgtgcaaaaggaccctgggatgggccaagtcatcagttgtctgagcatcaccttatcacaaactgaatttgtcacaaggctggtgacctggagacatgacaggagggagcatgtgcagctctgggaactcatagtcactctgtgctcagagtgactccagctgaaaactgaagagctgccctgagactctaggcaacccatccccacacaaacatgggtagacagtaagtgtaggcaaggctcaaagtcactttccttggtacatttccacatcccgtgttttcctctatcagagcaatgtcataacgttctcacatgcccaccagactatgagccccttgaggtcaagaattgtatcttatccatctttgtgtctctagcagctagcatagcatctggcacatggatggctctgaatatcatattttaaatgaatggaatgaatgaatagtagatgaccatttccttccttcccctagccaccccctactccacccccacccacacacacacatcattacagaatcatcaacagggaatgaaaaactggcaagagaagagaaatcagtctctctgtcaatacagcaaaagtacaccagaaattatcccttgaagcactttgagcagaaagctgcagctgagtttttgctatacatattcatatacatgtacatattagataacgtgaagaaaaattcaagtaattatccagatcatttaagttaagacaaaagttatgggcctgaattattcatgggtatttgtcgattatcaaacactttaaatggatcaggcccatctactcaaaatagagtccaattgctagcaaatacatcaccctcttgttctcttccctctttgttcttcagcatcctggctctgaatctctatacccagctctggagttctttgcttttatagctgcagtccccaacctttttggcaccaaggaatggtttcatggaagataatttttccacagacatgggtgggggatgattttgggaggatccaagagctttacatttatgtgtattttatctctgttattattacgttgtaatatataatgaaattattgtacaagtcacaccataatgttttcctgcagctagatggtcccatctggggatgatgggagacagtgacagatcatcaagcatcacattctcataaggagcttgcagtctagatctcgcgcatgtgcagttcacaatagggtttgaactcctatgagaatctaatgccaccactggcaactgatctgacaggaggcagagctcaggcggtaatgcaagcgatggggagtggctgtaaatacagatgcagcttcactcatttgccctgcctctcacttgctgctgtgcaacccacaacctgctgtgcaagcacactggaaatcacttcctgggcttgacgtctcagtggtgcccccttctggtgggtgctcaccatctgggtacatacaggtacagctgggggcaggaggtactcccacacttccacttgactcctggtactccatacccgaggggctggtaggcctcactccttaggggaagatatcggacaaagcaggttgactttcctaagcgtaaaaaatggataggtgcttagtccactgtttcctacagcttaaaacctgtcacataaagaccatattgtaccctaactggaccagtttatctacagacttctaaaaagcaaaccaaagtcagattttagagaatggaactcaaagcaattaactaaaactgtctttataaagtcccaaaaacggtcatgagtctttttagttctttttttttttctgctaattagttcaagaaaaaaaatcactaagagcaagctggttttcttctaaagtcaaatctcccacaccctcattcatcgggtgagccttcccagcctattggaggcgggtagttcatttgagaatgagttcatggccccaagtggtcaatgtgcagtgactacaaagtctcctcttttctatttatgagagatatattgcccttggctcttgccaggtgaattatgacatgatacgcagctctttgggccctgcccaagccatctcagccagagagaagctgtgccaatggacaatgaaagatatttttgaaaccatgtaagtatatttccttaaaaacatagaaaacacaaattctcctcctrtttttgctatgggtttttcacagcaactttggcttcagcttctttgggccaaaatttcttcatgtctaaaagaaggatagttcaacactcctgacccagttagatattcctcctctgagggcatggccctttacctgcccatttatcctgcctcattttgcagtgctattggcttccacatctctctcaccagctgggctgtgagcttcacaaagtctggggtggcatctgggtcactgttaagtctctacagcatagtgtagtgctggttacatactcttctttctcaggttcctccaggtcttgtttttcaattcacctcttcaatgttggggctcctgaagtttccgtcctatatgacttcacattatctcactccacaccactccctggataatcaaatccctccctcagtcagcaagtatgtatctttgtgctgctaactcctaaccctgtatctctaccccagttttatctgctaagcttaagacctggcaatctggagacctactggatacctccattgaggcagcccaaccccaacaagtaacaattgactccatcccgtctgatatctacatgaaattctgatggtttagtcttccattgctggggtctgtccacagctctctatcctgctctttctgttctagtgcagccccacccccaagattcatcaagccaccccatgctccgctgaaccaccccaacactccccagtgggagcttctcccatatgctagcattctcaccacttcacttcactgggtaagttctactgttgaacctcatcaccagttttcttcatattccatgctggcttctgcctgtgtgtgttttctaggacaattgtttaccttccttgcctggcaatattcaagtgtcaccacttcctggaattccttctgtaccccttctccgggacaagtacctgcttaagaataagtggggtgtgtttaaatggagaattgtgtttgtttgactttgataatctaagctcatgttaggtgtttaaggaaaggaggggcagagagataagcagaatttgacaaaaaaatgagcagtccttcaagcatgactctcaatgagacagaactgtattggagattgctatatgccaaacttaacacacttcccaaggaaagaaaaaagcatagagttcatagcacaggatgtggattcagactgcctgggattgatctgcaattttttcattttataacactgacaagagcctcaatctttctgcacctcactttcttcagctgtaaaatgggaataataataatagctcaggaggttgttgaagagatgaaataatacacatggagtatttaaatcagaacctggtaaagaggaatcaggtaatacatttcatttgattttatartttaagttttaaaacaatcaccctttttcaatgagttctctgccctaagctgacagtttctgggcttcacctggcttaacccctgcatcttttagaccagtgcttctccaactttaatgtgaataggaatcacttggagatcttgacaaaatttggatttaggaggaggaccctaggttctgtgtttctgacaagttgccaggtartggatgcttgcagtctgcagatcataatttgtgggaaaggctttggagtttggcacagaccccaccttctcttcagtgggtccctgctactccaccaggtagatttagatccctgtcctctaattcacttatattattgaacattcaggcttccatagcaatataccataactgactgacttgtaacaaacaaacaaaaaaaaacatttatttctcatagttctggaggctgggaagctcaaaatctaagcaccagtagatttggtgcctggtgagggcctgcttcctggttcacatggccatcttccgactgtgtccttgcaggatgaaagagacaaggcagctctctgaggccttttttctagacactaatcccattcatgaaggctccaccctcatgacacattcacctcccacctcttaattccatcaccttagggttagcattttaacatgtgtattttggagggacacaaacattcagaccatagcaacattcttccatcattcattaatgcatgctttcatttagcctcatatggcgaatatttatggagtaccacartgtgctgcatgcaggcagtaggggtgctgtggtgaggaaaagaatccaggatcctgctattaaagagattataatctagagttatagacagtcatccatcaaataatcacctaaataagtgaatgatttcaaactgagttaaggacttttaaagcaggtttgatgtggggccatgattagttgagaaaagtgaggcatccagggtacaaagcttacaagaagcacttgttctcaggggctgaccctgcacttgtgcaaccctgcgaaggaataattcctgaaattgtgtgctctaggcattcagcttgcactcatttctatttaaaaggaaaatcctgactagacctgagatgaggaaattattcttaatatctacaggaagaattcatgttagcaggtaagattggaattatgttttatttatttgtctctactgttaaacaacgtgctctttgagagcagggtctgtccttttgtatatcaccggaatggacactggcacatcacgcgggaatctcatatcagaagcttgttgagtaaatgcctgaacaatcatattcgcatcagtattgctgtttccctttttatagttgaggatgctgaacacagagttgttacagcatttccctttggtcatatgatgaatacgagatttcatccacagctatctgattccaaagctgccctctagatttgatgcttctttaaggccactttatctcaataactatgctcatttcagaggcaataagattaataaagaaaaagaaaaatgaaatgtaccttgcaaatagtagcaatgtttatcatgatagttatcactatcatagatagagccaaggggataagcacactgtattgaaaacaacacctgaataaagggtcatcaaaagacccacctcagattttacatacaaaacagtgcaactttcttcaagccactcagcctgtcttggcttcaaaatgagtttctgatagctctaaaattctatgactatgaaatgatttctgagtttccttacagctctcaaaaattttattccatgagttataatgaatgtgcatgtggggattggtatgctttccccatttatttgcctcccaagatcagataatgacaattcttatagaacacataacttgttgaggtctttgacctctgagattcttaagaagagaattatgastaatgatttagcaaatactgaaagaatcactccctagatggtatttaatatttaatttctcctagtggtttaattacattggcaccatcagttgcaaatttgtgtgtcattttagtcattcagtcattgaatttgtttcgaacggactagtaattgtgataattaattgacaaacaattgtgtactttgactatataattagtgacttcatggcacttgcctatctctcatttccacaatgtgcatgttactgtaatcaacagccattttgtgaaagtattaccgagccatgattgaattggacatttacacagcctgaatagtcacaacctggagcccgactttggcacattcatcttccttgtctatggaccccaggaaatagataaggtagcctgaaggaactcacttaatcctgctataggttagtcactgcatccataacaagatgagaataaagtagctcctttatcagtaaatgagctaatgaataagaaaacattttgaaccaatatacagcagtaaacaaacactgggctgtattattattattattatwaattattcctataacacagttgtgtctgatgatgtcacgcaatagcaagctgtcttgttctgtcattggcgtgaaactgccaaacacgcgacagtggtccacaaggtgactccactcatgaatcacctgaacagtggatgaaacaaatggtgccctgggccattgctggcaataatgagcattgcacactagaaacaagaactacactgcaggatgagaggatgtccactcatggacaaaaatagcaatcattagcaatcacctctttgccctgtatctagaacactcttataaggaagagaagccatgttgctctaaatgctggtatgtcttcttagagctttccacactgaagtctttccttatgtaaagtccttcttaattttgtggaaggtctatacaaatttttcttcaacatcctacaaaaaagacccaactagccatgggttcgaggtaatttggatataaaaaagcctaaaagtatccttttaaaatctagttaataaaattgatctccttgggcatatctcatgcacatgtgcagatttcaaactgggaacttatctcaatatcaaacaaccattaaatgacagcaaaactaatccattgtcaataaaattgctaggaaatatgtagtaagataaatatcaaatttcttccaacaaataggacgaacaaaagatttttagaatagtggcagctcctttttcaaactagactaagcactaaaatataaaacttatgaaagtggcactgtgtgttgggcaaggagggaagatacagtctgcctctcctcctgcagcactgccatcttctgctctgtgacctaccaaggcactgccaagcttccaccaaaaaatgtttcagaactaccactttataaacccactcctaggtctttagctgttgaggacttaacttagatgttcctaaaaggagagtaaggtaaaagaacacrctcatatgtggcaataatttattggtgttgattccagtgtccatgggcatcagggcagaagggtctcttttgtttcagagtagcttaggcacagggcaatggctgtgatatctagcacttcctacacacctaccatatctgaatctgcattatatggtttgcacacatcctgtccactcttaatggtattcctgcataatattgcaggattgcaacctccagtttgaaaatgaagaagttgaggattagagagtttaacctagctagagtcattccgattgtgtgtggccaagtgaggatttgaactgaagttaatttggctccaaacatgcatgggttcccactgactctcaccatcaccaccctgtacatgctgagtggtcatttaaataaatgtatatttacatttagtaattcatattccttccatcattccaccatctactatgtgctagacttgagggaagcagtcaaataatacatgtgttctaccctggagccacttacattaccagaatacaaacacaagaaagaaaagtttatctgttgttacatggactgcctcttgtgttggccctgctgagagctgcaatgggttttatactttaatgggtttcatcctttccactaagaaacttgagaaatggttcattcttttacctggccggcacttgctgcctgtgacagaagtaaaactagcatttatggggaaaatatagacatcaaataatataaagttctgatgacttcatagttcaccatctttctttaagaccaatccaaatgcccatcaatgatagactggataaagaaaatttggcacatatacaccatggaatactatacaaccataaaaaaggatgagttcatgtcctttacagggacatggatgaagctggaaaccttcattctcagcaaactaacacaagaacagaaaaccaaacactgtatgttctcattcataagtgggagttgagcaatgagaacacatggacacagggagggtaacatcacacactggggcctgcctgggggtggagggtaggggagggatagctttagaagaattacctaatgtagatgacgggttgatgggtgcagcaaaccaccatggcatgtgtatacctatgtagcaaaactgcacgttgtgcaaatgtaccccagaacttaaagtataataataataaaaaaaacagattggtgtgcacaccaaatggaaaaagaaaagaatcattacataatatatcaaaatacgcagaccaagcatttatttttacccagatccctactaacaaaaataaattcctttctttcctacttatattcctgaaagtaatccaaacttagttgcccacataattctgaattaccctaaattgtttttgcatatgtttgaaaatgataagccatttgaggacacacttgttgtattagtctgttctcacacagctataaggacatacctgagactgggtaatttataaaggaaggagacttaattgactcacagttcagcatcgctggggaggcctcagaaaacttacaagcatagcagaaggggaagcaaacatgtccttcttcacatggcagcagcaaggagaagtgccaagcaaaagagggaaaagccccttataaaaccatcagatctcgtgagaactcactcactatcacgagaacatcatgaaggtaactgctcccatgattaaattacctcccaccagttccctcccacaatgtgtgaggattatgggaactacaattcaagatgagatttgagtgggtacacagccaaaccatatcacatatagaaccaaactttattttgggaggtaatgtgcccagttgcattactagaggatttggagaagcgtttaaaaggtgtctgatccctctgggagacccacmtttttttcacccaccctacatcctttagccatctttctacctggtagacagatgtcatgacagctccaacagccatcttggactatgaggagagatggaagccatacagaaggttggtgggccacaaagaaataagaatccaagaacgctgatgatacgactaggcaccatgccagccctagactgctcattgctagattttttttaagtgatagaaaatactctacttttgttttagttctcctttaccaatatctaatataatttctaatcaatattggctgcaaaatatactcatgctgtatcatccartaaattaacattaactattttttgagataacattgtaattgcaattcttctatcttatacttatctgtttaatcacctaagacaaatagagccatttacattttatgggtgctttgttttgctttgctccatatttgagatttgagaaacagaaagacctagatcagatgtcatgtcatctgatgtataatttatagcacataataaataccaggcaacaattattgctggagaagactagtgggactatttcccaagggaagaaactgataccttcctacttgtaactctttgaaagtgcaccaggccttgtgagattagaaagtagtccccgagggtgcttagcagaagccagatgcccatcatcagggatttggggaaaagaagaaggagctggactaaactattttaaaggtcttctctaatttgcagcttatgattctgactcttgaagttataaataattggtaagatgtagaataattggactctaaaaagtagagaagtccaataaatcttccaaatctcagaaaggaatgttggatatttacatcaaactatgtccctaactttgtcctcctcctggttcttgatctcaatgaattcagcattctctatttcatctttgcagttgcccaagacagaaagctcagaaggcatccccaacaattctccctctcactgtcccatggccagtccattgcaagtttgcctgctgaatgtcctcaagtgcatccaatccgtgtcttctccttccactctagagcagaagatactggtcctcacctgaatcacagtagcctcactacatccacttttgcccccttctaatctattttccacagtgttaccagggtgcaatttttttatgatgatggcttagaatcttcagtaactgccaatagctccttattgatcttaagacagaggacaaattctttcctgggatctacctcttagatctgactgctctccctcaggtagtggtaatcttcatcttgttctccttccacaatatttttcattcagttctttgaaagaccyatgccatcttctacccctcagctgtctaagtttctgttcttcctttgcccaagatgttcttccctcattctcagctcaaggaacctttctcagggacgcttcctctgctctctcttaagtcacaactcaattccatttcattttcaaaacacccgcaattttcttgaaaaacactcccttattgagagagagagagagagagagagagagacagacagagagagagagagagagagagagagagagagagagagagaatttgttccatgtgttttctggttttcccagcagatagtaagagcaatgaagatagggagtgagtcaggtatgcttgctcacctgagtagtctcagcatcccatgtttgttaagtatttatctaagagtaaatgtataaatgagaatacccaaggctggtgctaaaggcttgtatgtatggcaataggatgtgtatgtccaagaaggtgagatatacctgggttggattaagattcaagttagtgcttctaccagacttctggcctgtttctatctggctcaaatcctaggtaaggctaaaaattgaagctaaaatgtttccagtaccagcagcttaacaggaatcatatcaagagaagatgacccaaagaatctgccaaattrtaactccaatgatcctacacaaaatcactgtgccagaatgatgttcttcttttaatagctgatgttctggtaaaaatacttgtggcttccacagcctttaaatagatggtatcattaaagaagcaaacacaaattttattaaacataatttatctcattttgttgcttatgtggcaactctacttgtagaaaacatttgttgttgacctgatatagttagctaccctatttgtgcaatgctaaaggccaagattgcctaatatacaccagctcatcattttcattaataccaacaataccgtcaatttyataccatcatmttcctctttctcctccctcctcatcaccttcacaagagtccctggcatttctgtagtgttttgagctaaaatgaaagtgtcattatttctgagaacattgaggaagacttcaccatggaggtggcaggtgaactgggtaagatttagagataacaacaaaaatagacctccactgatagacatggaggcctaacctcctcctaaccmtgcccttccttatatgttaatctccaggagattaacactcctatatttcctctcaaatggaagaagatggtttggcagaatgagtgagaacacatgctgtggagacagagtacctggcttgaattctgacaccatcactcattagctgtatgacctggcaaatcactaaacttccataagcctcaattccttcatctataaaatgggataattacagcatgtgtcttatataggagtgagcataaacagagacaatgcaggtaaagtctcagagtggtgccaagcctgtaagtgttacctgtcattgtgcagcttgcagggaaagcatcatgatggctgtgatcttgattctctaatttactgtcacatctccactcttgagaacaatgcctagcacacaacacatgcttcatggaaattttattgaatgaatgaacagaacccctggggagggtagtgtggccaacctatgaaaaagttagcagcagactgtgacaaagcacaagaaagaagcatgattaattgaaatgcatgtctttgatattttaaactgatatttccaaaccatgcaactgaaaactgaaaaaaataaagttgaatacgagcattattccttcaaggtagtgtattttaacaaaaggaggggaaagaactacctctctttctttgagggttctstttgagctttgaaaaataataattgctaaagaagacagtatcagaactacattgagtcattattttatatgaaatattgaagaagggtaagtacttcaaagcccacttctttcccttaaaccaacacttattccaaatgacaaactccctcaattacccgtaacattaatgtttatactcgrcatttgtaatacaataaaacataaaatgtttatactcggcatttgtaatacaatttatattttaaagttttctgatatttgatgtatcagatgttggtgcttatcagataaggaaacaagggtccgaaaggtttcttaacttccaagagctgagcaggctgctaacctggtctgctcatctcctagtgggattttttttttttctcttacatggcatacttctctgccatcatttttaaaactctgagggggaaaaggaagctaaatgttaacatgctgtgaccagtaaaccaaagatgcagtgattgctagtaggctccatcgtcggccccttgcaggtggtggggacatattcaggggtggtggatatcagtgagcacagcccctgactggtggctgcccatgcagagtgtgggggtggggagtagatggggggcttttcctaatgcatctagcacccagtgctctctggcttcctagcttttcccatcccataccataaagagtagttatgtaagcatatttcctgtacttaaattcacaagccaatgtgtggagacaaggacttaggataggagtaaagagtccaaatttgaatgtctccagccatctagctccgactgctgcctgctctgactttagaatcatggacattccagcccggtgtggtggctcatgcctgtcatcccagcactttaggagaccaaggcgggtggatcacctgagatcaaaagttcgagaccagcatggccaacatggcgaaaccccgtctctactaaaaatacacaaattagccgggcgtggtggcacatgcctgtagtcccagctactagggaggctgaggtatgagaatcacttgaacctgggatgcaaaggttgcagtgaaccgagatcatgccgctgcactccagccttagtgacaaagtgagactccatctcaaaaaaaaaaaaaaatcatgtacattccaatggacattccaagttggagtggtcctcaaggccaccaaagtcaccttctaatcaaagcacgagttctttctccaacatcctagataggaataggagagttactcttagggctaaagaaacttcaggaagagttcaggaggcagcctgtctgctagtttgtgttctgtcaattttagcagatgggccaatggcttttgggggataactctcgaacagaagtcaggcctgtcctctgytccaaacctagaaggactcctcatctcatgccgggtcgagccagtgtccctacaatggtccaaagacctgcctctggccctacaccttcttcgtccctgtctccacatactctctctctctttctcactctgctccagcctcacctctctcccaggagtcccttaaatgtaccatcttggccttaccactggctattccctctgcctgaattatcctttcctcagagatctgcaagactcactcaagctttgacacaaaagtgacccaatcagtgagagctcctcctgtgacattcttyttttattttttaaaagasagagatggggtctcgattgatcacccaggctagagtgcagtagtgcaatcatagctcactgaggactcaatctcctgggcttaagcaatcctcccacctcagcctcctgagtagctgggactatggtcgtgtgctaccatgcctagctaattctttttacttactctattgcctagacttgtctcaaattctggcctcaagtgatcctttttcttggcctcccaaagtgctgggattgcaagtgtgagccaccatgcccagcctcttatttaaawttgtaacctccccccaccatactgcattcccaccccaaccccatgttactctcccctttaactgctctattgttttaaattactttttaccttctatcactccagataatttatttatttaagttatttgctcctgctagcaaagcaggcacatagtttggagatcatgtccatttctcactgacatccccagggtctacagaaatgcctgacatgtagtaggtactcaggaagtattaatcaaatgatgaatgaagaaatggatttccatcaataactgtgtattgatgtttgctgtcattcttaggtagacacaggcttcctctctaggtgttaggattaaaaatagagtcttcagaaaaggagcatttggaatcatcagatttgggtctgagtttgggtccagccctctctacctagctatgtgcgtagagaagttgttttacctctctgagcctcacgtttcacacctagacgtggatataataactcccatactgacttgtcattataaaaaataagataatttttttaaataaatcactagataccaaggagaaaaataatacatttaactattatttttagagtagtaacagctggataaagctatgaattgtttagagataaaatagccaaaattaaagggaagacaataagsctttctggactgagtttttaaagtctctgtaaaagttgatttgtttatatcttctctaccaccctttatttgcaccattcagatttatgaaggcaattgctgcaaatgtttgttgataatggaatctgtactcctcattactcctttggatacctgcatagtgygctcaccatttggggtctctgcrtaaatataacctcatcagagataccttccctggctactccacctaaaatggaaactcccttcttctataatttgtttctccttttaatcagctttatttttctccatagcacttttcatcaaggcaaataaaatgttattttttctttgtttattttctgtctctccataaggcaagtgagagatttcwtctattttgatgactgacatatcctcagagcctagagttgttcctgctctcaccaaattgaagaaactgctctttatcaatcaattttccaaaaatatagtttgaagacttatcttagaggcctatgtctaacccaatagcatgtgccctgggtaagaccttagtgtgcccagaatactccacatttatgcctgtctcctttctctctgaaatacgtcccattttgtacaataaatgacattgtcacaataaccgtgaagttcagaagaattaactatgacacataatcccacattaaaagaacagatggtatagatgagaaaaagaaagaaattaccattgatagtaacagctaatagtattaagtgctattatatgccaaggggtctatgtaattatgtcactcagtcacaacaacctatgaagtaagtcccattaccattcccatttaacatatgagaagtctgaagtttagagggggtaagtagattccctgtgttctcacaactagtaaaaggcagagctgggattcaaatcccaaaaacagatctttgaactactaggctagaattgcaagcactatggtgaggcttttccctgtgtggcctcattttatcctgtgttaatactggaaggtagttattaattatcctgctttaaaaaaaatggtaaaataggcttagctgtgttaagtggcagaattaggatttaaatctaaaataagcatatttatttttaaaaattgtgaacaggatggtgttaggtatgaatcaccatgggctaaagatattttatgttactagcttccattatatttttactacctaacgtgtcacaaggtatataactcagcattatagaccaaaacccattgcacttactcataatcaccatgtacataaatttcggaagaacattttatttgattgaaacgtgaaatgagtaaatttgaaaaagcaagggtaaactaaatgcttgttaatagatttgcttatgcttattccctgctgtagaggttaactgatgcctctctttagctagatcaccaattttaagccactctattctctatactcatcagagaaaaggagtattgggagaccacttgattggtctcarcttgtaaaataatacagttgagaaactttgtaaagttatttcatgtgaagtcaccttctttatgagtggggctactcaatttgtacttaacaaaccattttttcatttttcttaggctaatgtgagattcctttgcaacaataaacacacttttttggtaaagtataacagaatatataatggacttctctgaaggagttaggatcaagacttaggtgacttgggaaaatgttccaacttttggtgcatactgtactttatcaaccctgaacaacagatgcattttaagagaaaacaagcccktggcaagttgctatttttcgctcagtaactaatgatgaatcaaaatgcttcttcaaacccaattacccaataaaaattgccatagtaaccatcacattacaccacacacccttcatgctcacaccaaaaacttccttaggaactgctgacactacctccttgacactgccatctgctatggaggaggagatggtgggggaagttggcaaggaaaaggtaattctgtgttttgcaaatcactgggggagggggtcttgtggcagagatacactggtagaaaaattattttctgaagaactctatatcggtttttaccatgagcttgaagtggctcaacccaggagcttcagacctaaatttaagcttggtcataaagtgacctcttcccttcctccttcccttaccctacggcactgtaggatcaccctccctgctctccttctgcccagaataattgttgcctgggtcttttcttggtccactcctcttcatttgtcaggttttatctaaatatttcatccccagaggttttcccctgactacttaatttaaatgaaagtctccacaggatgtcccattgggaaggggcctaatttgtcttatttgtcactggaatctaaatgcctcagtcatacttgggactcaataaatgcttataaagtgaatgaatgagggaggaaattatatatkggtagtcattatcaacattaacctaataacctagatggtacaaactaattaaatccattgattaggtttatttgacaaattcattcattcaactgcattagtgagggtaatgcacatttgttagttgttcaaagttaggtcttctgagaagcagactctgagaaggagataagtttgtaggaagcttattagggattcggttgggatcagtacccacggaggagaaaagttggaagcagaaatagacaagttgagctgtgacgcaatttcaacagagaccacagtcaacacttcggagagttctgaagctgggatgaccttcccaggatgttctgagttccattatgagttccattatgatcctttatgcctccatgttgatcagttttggagcatgaccttggatgagaagaccctctttagctgaggtaatcctcaaaggagactggcagctgaggactgtctgccagaagcaatcctaggaggacaagtccatctttcctgaatggagacccgatggctcatcacaggatccaccacggtgcaccccttgtacctctaggatccacttcttcatactgtttctgagagctgttcctctatgatcctggtaggtttctcttctttggggaaatttaaaaaaggaagattagtgggacaaattacagtccctkytgctgcagttgagtcttgggggcaccaaccgatgtacattattctagattcccctcacactccactagtacctctgctggtcttgtggtttacctggtggtgtgacccagactctaacctctgagtgctctgagcctctggtcaccatgacttcctcaggccatagaagaacccattccagatggtgattcttcttgtctgttggtcacttgacatgaagaacccaacatgctcaggtgaaagtcatggtttagagttcagtgggactcttgctctgtcacctgatgaaaacattcagttttggcaacctggaactctaaagcaacaaaatgcagagtttctggttctgagatgccaggctccccaaatgggttcctgggagtgatggtaattggggccactcctgcctctacccccttgttcccctgactcatgtattctacctatcagggacacagcaccatttagaggcctttgatttagtgtgtccactatgtcctggagggtgacaacccatcctcagggagtattgactgcaagatggctcttcagctgcaccctcaccagggtgctcctgcattctacctgggcatcagcttctggggggtagagtcagtgttggaaccagaggatcccacggttttatgccaattcttgcaccccatctgctgtaagggaggtccctttgtccgacacaacacctggaggaacctacagtattctccccaagccaggtccttcaatacacatcactccccaaagctataacaaacctaccccaggcccatactgtcacctccacttttagatgattacagctagccttagaagaaacactcttaaatgttgttaaagcagagcccttgctgtcccatcctctgggggtcaggcactgagaatgtggtgagaagggcagctttggcagtgacctgctggcccaggtccatccagcaggggaaagagtcacttgattctttcaggtcccatccataaagcactctagatgcaatgcttggcaggccctacataaagaggggagagaattgaatyggtattcactctggtcttcaaaasatatctaatttgcctatctgtgaatatttatagactttatttccacagcaatgttgaaaatgtccctgtgtccacatgaggagccttctcagaaagtatacctgattcttttctgacagccagcaactcatgggtcattaattcttttttttttcattcaataaacttttaatatgcacctttcattgctaactactctgccaggggctgcatgcgtctatcctagattcgaggcacagaagactggattttccaaggtatacctcttttgctcacttctacatctgtttcatgtgttatgactggattgtgatgcatattctattttgtaacttaggtgaaacctaacttccttggaatcactgcttcactggggttaggttttaaaaccaacagctgagtaaaaatcatgcttttaaaaactctctcaaatgcccacaaaaatcagtaaatggatgtatcatatttcagcaagtccaggatagccaaatttcctttctgtatggttgaactccagataaagcagttggcttgtatttaggtagcatgattatgaaagagatgtaactttaaacctagtgacacactgagtccagtggagtgagcacgctattggcrgccacagcttgagacactatagatcctcatcttctcactccatgtcaaatgctcatgaacagacagcattgctggaattatttaaagtgctttatttcctcctttcctctcccttttgcttccttttacttaccttcatttttcttcccttatttgtgtatctgtttttctctctctcttttttctctctttctctttctctccccaaatatttaattaaaatggcatacaaactaaagacacagatgtgaacattccactgcattataatatgttactttgtacaactcaaattcaaagagagaaacttcctccaaaaccctrtgcagatttgacagaactctgaacctggttctttgttttccttgcaaataatagttggattttattatgcacatgatcccctagaagcagcatctccccataacactcaatttattaacattgatactaataagaattatttggtggtgacatctctagctcgaatgttcaaggaagtgtttgtgacctcctaaaataagaaagtccatatattgtgaggttcagaattggacatattgacatgaaatggattttggaatccatactctcagctccattgtaaatatgtaattcttgggcaagttaggtgagctatctaagctgtctttctttttcatacaaaacaatgcagtcatactttgcaggattgggatgaggatttaaggagataatggcactataatgtgaggcatttaggtatggtaatctcttggctctctccttgcttccccaaccatgtgcagccactccaaccttaccatcctattctccagcaattctgggcacttttttacctccccaaatgcttccygcattttcttgactttctacccattgcttctttaaaacactttccccatccttgcttgcctaacttctatacattattcatgaatcaacttaaatgttacctcctcgagggagccttcctggattccctaccatctayagattctactctaatgcattatctttacagcatagtatagttagtgcttaaaagcgcagtctttgtgttagtccattctcatgctgatatgaagaaatgcccaagattgggtaatttataaagaaaataggtttaattggctcacagttctgcatacctggtgaggtctcaggaaatttacaatcatggtggaagacacctcttcacagggtggcagaagatagaatgagtgccagcaggggaaatgccagatgcttataaaaccatcagatgtcctgaggactcactcactatcatgagaataggatggggaaaagggggaaaccaccccatgattcaaatacctccacctggtcactctctcaagcaatggcccaagctgatgttggccccttttagccatgactggggctcagagcgccaagtcctgaggctgcacagagcagcaggggggcccttggcctaccccaggmaaccatttgttcctcctgggcctccaggcctgtgatggggtagggaggctgctgtgaaggtctctgacatgccctgcagacattttccccattgtcttggtgattgacattcagctcctcgttacttatgcaaatttctccagctggctcgaatttctctccagaaaatggatttttctttcctcttgcattgtcasgttgcaaattttgtgaacttttatgctctgctttctcttgaaccttttgccgcttagaaatttcttccactagttaccctaaatcatctctctcaagttcaaagttccacagatctctagggcaggggcaaaatgcagccaatctccttgccaaaacatagcaagggtcaccattgctccagttccaaagatgtttctcatctacatctgagaccacctcatcctggacttcattgtccatatcactatcagaattttggtcaaagccattcaacaagtgtctaggaagttccaaacttttccacattttcctgtcttcttctgagccctccaaacttttccaacctctgcctgtaacccagttccaaagtcacgtccacatttttgagtactctyatagcagcacaccactcctggtaccaatttattgtattagtctgttctcacactactatgaagaaatacycaagactgggtaatttataaagaaaagaggcttaattgactcacagttccacatggctggctggagaggcctcaggaaacttacaattatagtgtaaggcacttcttcacagggcagcagaagagagaatgagtgccagcaggggacatgccagacgcttataaaaccatcagatctcatgagaactgactgattatcccaagaatagcatgggtgaaactgccccattgtttcaattacctccatctggtcccactcttgacacatggggattattaccattcgaggttggatttgggcagggacacaaagccaaaccatataagtctctgaagcctgacttgctgggctccaaatttgtwtggaggggtgagctgaagcaagttacttaacttgtctttgcttcagcatcctcatatataaactggggattagggtgacgttgcatccctattttcttatgaaaaatgaggtttagacctctgaccctaacagaattactacaaacagccctttcattgtcaaaaccattctgattggacaataaattatatggtcaccctaataataatagtagcacctacctcattggctgactatgtgaatttaatgggtagcaatgcctatgacacagtagatattcaataaaatcagctgttcatgtgacaggtatcaattgtctcagtgtacctctgtcctagcactcattcctctatgcagtaagtgcatgtctaattgtctgycttcctcaccagacctgaactacttgagggcagggagatcatctatcatgatcatatttgtaccctcagtgtgcagttcaatggatagctgtaaagtcacatatacaaaaagaaaataaatccctatcacaggattagaaatttgtaaatgtttgaaagataattgctgtattttgcaaacaaaacagatttgtaaatgaagctgcacacctctcatttatctagcaataatttactgggcatctactgtatgctggtgactgctaagctctaggaggtttctcagtcttcaaactattgatatttagagctagataatttttttggtgggggagagaatattgtcttgtgcagtgtaggttgtttggcagcctctatggcctccactactatatatgccagtagcacatgctctctctagatgtgacaaccaaaaacctctccaggcattgtcagatgtctccttgcaggtaaaatagtccccatctgagatcactaataaggaggtaggacctacctctttcaccttggaaatggtgctgggagtctgggagatctagtacttgcaaattttgcctaacaaaaaccatgcatgggatcctgacatagttcatatagtcttcttatttcctccctgagtaattagtattcataaaaagttaattcagtactatgtgctttttttaactaaaagagtttaatcaatgaatttaataaagataacacatctgcataagattttcttttttactgtttgtacattcattcattattgtgtgcctactgtttgccagatggtttatcttcatttgggattttatctcctttggacatgatatctttttcctctcttctttggtataataagcaaagaatcatatacatccattgcagataagtcatgaatggctctaaaagattgatatcatcaagaaactgaaatcctctgtttgagaacaaagcctccatggaaasgttgtcwtctggccttggcactcacccatgcctttctgaggaaattattacaggtcttttggaaaccctcagttctgacatttctcatggagatctaaacaggattggtgagagaacctcttgttatttgtgtttcctgccactccttccctttttatcaatgttgcccagcattgttggtgacccaggcagtgatctgtccgctaagccaccagggattgtgactgtgaaaatgtaagcttcctaagatttcatgttccatatgcaaatggaaaaaaactaaggtctagaatcctgccatgtttagatagactttttaggtagtagatcctttattaataatagtaagtcatggggaaaaatctcatcattgccagagtaaataaacttgaaaaagccccactgcccaggaaatcattctcttgataagggcatatgattttttcccttgagccacaagcacacagaggtcactggtgcctcttcagtgcctctcctgctgaatctcccagcggctcctacagacaaccacaggagcgtcctgtcaacaaagatttactgaatgactgctgtgtgtcaactacaggaatacatcaatggatggcagtaactcctgcccacaggaaaacacagacaagacccaagaactgacaggagctatagagcagtrtgataacagtttgctggcaggaaatgtgagagggggacagcctaaaagatagggggctttcagggaaagagaagctgcttcttgtgcattgtgaagcatgctgaggaagtagttgtgtgtgtgtgcgtgtgtgtgtgtgacagagagagagaaagagagagagagagagaatttggagtgggagcagggagacatttaaggaaaagggaaccaaatgtgcaaacaccaaggtgtggttcatgtattattcagggttccagcaggaaacattcaaaagagtaaatgaagtaagctgaagcaaagttttgagatgggattaagggagccacaaggcttgatgaagcacccatggactagctgcagaggaagctgtttccactcctatgggcctgaaggggcaaggggagggatggtatcaccaggccctcacaagagctcctctacagtagaggaatacagtaattgcacaaactccagcacagcaggataagcaattgccccagatcttgctctctctcgttcctgatttttctgtcttcctcttcggctagccatggcaaagcccaaatggaaactaaagatgaagaaacttgatagatacagtccagagataacaacttttctgggcaaagagtgggacacagaagggcagttttttagaggccaaaggagaatagccagcaaagttggtccagttaactccaarttatcctgtgtgactrgaagcctggaagtacacagggaagaaataagagtcaggagagggaaccagagaggagagggaaagcaccaaatcccaaaggctcattcatagtctctgcccagtgctttagtatggaggcagcctgtatgaggacggcagtactagtggctgccattttsggatatttactgtgtatcaggcaaatactaagtattttgtagacagcgcttccaatggcctcgtttagcctttatagccacccaggaagaatcctcatgcactgactgctaagttccaattcctttaataatgatttgacaagttctgcttcattttatgctctcagtaactttaggtgataaggatttattttttcttttgcatgtgaagmgactgtaatttcactggaatatgagatctagggggacagagacttgttctgtatccctgagccaggggtagtgtctggcacacagtatataataggtcaccagtaagttaaaaactaaaatagactcagaggctctcagaggtggagttttggagttaaattctgacttccaaactctgaaagccctaaaccacagaatgatcccagccagttgaggggggaagaagtgcacttcccttcaaccctgtgagtgtccatgagaatctaatttagcagaggccttccctaagagaaggmtgcctggctcacagccctttagtctctcccctagaaggactgcatattattagtctgtaagctccaagagggcaggawatgtgtttgtttggtccacataygtataaccctagcacactgcttgacctataggaggcactcagtaaatatttgattactctacagatgaataagaagcagcaccgtgatgaataaatgcgagcactgtgcaaagcactggggctaacagagttcataatgggtgagcctgatcaccaacatttaagggcaatagtagatgcctatacagagtacaggtcgagagatcaaaaaagaaaagagtgattgaccaagatgaggcttgacctccatgaattraatagatgattgtcagacagatgaggaggaagctgcagaaagagcatgccagaaaaatggtatggcttcaacaaaaaagcatgggaggtggagtgggaatgggaggtacatgtgagacttccaggggcagaacaaagaaagataaagctggggagggtgttgggaggcagatcacaggcaacctgtatgctacactgtgaagttcaggcttgctgcaaatgccctgccctgtacctacttactttgcctgttctttgctcgtgtaaacctaatccctccatggtacactagactacatccaccctctcacctgctcaaggacttcactcttgcaaatcttcccccaccccttcccgataactgtgaagaccaaaaggaaacctttttttctctgcagttactccagcatggtgggggaggaaaggctcaacaagtcttgttgctgttgttgttgtttgtttttatttgcaaagagccaggcagtaaataagtaaatatttgaggcttagccaaccacatagttaatttccctccccctcctcttcctcttctcctcctccacctcctccttcttctcccacacttctttaaaaatgtaattattcttagctcacccataatctgtggaccctaggagaaaagtgtggataaaactcctccttgtcttcccagaaytctccaggttttaaaataaagccctgtgtcccagtcaaaccaagacagtcaatcaccctagtaccacttactagctctattatttaacctcgctgagcctcaattttcttttctgtgaaatggagctaataagcccaagcagggttgctattggactgtccataaaatagcatgtgtaaaggctaaagcacaggatctggaaaacagctggagtgtgtaaacagacgttcccccaagtccccttctgaagaggttggcaggatttctaaatggtagaattaagtcaggctgcaaaacactcctggaataattatggctacttgttttgtccacttctctgaatacaataaatagacattttgaatatgttgatatcttaaactactttgcattagcataatttaactttaaaatttgtgcaaaaattccttcatcatttttacctatttttaaatgttgtaatcacttcttttattttttctcaattatgggccttacttttagcctttaacatttttacttcttccttaatgtttgtgtgtgtgtgtgtgtgtgtgtgtgtgtgtgtgtgtgtgtgagatggtgtttcactcttgttgcccaggctggagtgcaatggtgcgatctcagctcactagctcactgcaacctctacctcctgggttcaagcaattctcctgcctccacctcccaagtagctgggattataggcatccaccaccatgcccggctaatttttttatttttagtagagatggggttttgccatgttgaccagggtggtcttgaactcctgacctcaggtgatgcacctgccttggccatccaaagtgctgggatgcaggcgtgagccaccgtgcccagccttagttttttaaattcatttttttaaaaaccttatatccctgttctttttcttttcattctatttttcaaaattctttctgttatcatttgaaatgactgtttttttccccttcttactttgtaatttctcaggatattattcttggaattcaagttgttaatagaggtttttcatcattcagttttactcttttatttattttacttttatttacttttttagctgagttcagsaggcctcatttttttttttaccttttcttagatttttacttaagtttactactttattgctatgttattttttaagcttcactatgaactatttataattctttctccaattcagtgtgtactatttataaagggcaggcaggaagcatggccacagagccaacagctgtgggaaaagcccacgaccctggcagaggatgttggtgggaactgtttgtccttcctcttatctctgcagctactcctatagattttcttcctcttttatccctttcttcactgaatccttaaagagtttaaccttcgcgataactgttcctcaagtggcctttctataacacatacccgaccaagtcacttacctgttaaatcccttcagtgggtcactgtagtgacatatagmcaatgaaamcaataataatgmcaataactgcaaccacagtcaatacatattgagtaatgattgtgttacaggtcttctgctaatttcattgattatccaacattttgaggaaggtattcctgtttccaggtaagaaaatttgggggccaaaaaagttgattaactgagccaagtttacataacaagtaaatggcattattagaagcccaaattcttagccactaagctaaactgttaagctctatgcgtagcacagcaaatcacactttgagtatccactcccgtagtgaggataaggacttcctacagtccccctggaggtaaatggcagcaacaggactgaaggccactctgtctgatccctaagcaccccctctactcttttccctgcagagtaaataatggacataaatgttctttgtaaagcaccgtaaatatagaagactttaatacttcatggtcctctgggatatttcttaacctggaggaagaacatccatggtgcatcatttatccagaaataaaatagaaaaaaattacaccataaactagactttggaaaaatagatggcctcatatttccatatatatctaacatttattgggcatttgtgatctgctagacatattcatatacagtatatatatataatgtatatatataaaatatttgtatatatagtatgtgtatatattagatatatataatatataatatttgtatatatagtatgtgtatatattagatatacacacacgtatatgtagtattaacctcacttgtatgaggcaagggtttattcccattggtcagatcagaaagttgaggctcatcgagacataaagtgacttgcctaaactcacatggctagcaggtggtggagctgaggaatgcaaacccaggtctctgatgacaaaagctccagcatctggcaggtgcaaaggcgtttagtaggaagcttccccacccactctctcaggacgcccacctactgcagattccagacacccctgagagctgtggagagcgtctaatctccttccaggttttctccctcactcctcgtcctcaggctttgaggcggaatagcccaggtggtaatcaccgctccagaattttttaagctacttggctttgggcaaattactctcagggccttagcttttccatttaaagatagagatattatggtgtgcttgagaacacctttgtgagggaagggataaacatacaggccctagacaggaatgggacctagttcacagtgaaatgctccatgaacgtcttaactgaatgaagtaactattttttacgatgcatttgaagaccctttccctgccttaggtggctcttttatttcctagagccacctggaagccaacctggtcttctagactgtgctggaaaggcctgcagacaacacgcacctccttcccaaggtgcgtgttgtctcttttccctttaccaggctcaagaactgatctgtaaaaatggccgaatcctagggtgcatgtggcgagcctggatttgttgatggggtgaactgtcgttgtgttagtccagcagagactcagccatggggttggtgagcacagctgttataattcaggctctggctcccattaccagggatcacacctcagctttaccacttgcatcattcattatctcaagcaaatgactaaacttcgagcttcagttccggcatctacagaatgctcatgttatagtgtctaccatattgggctattgtgaagactaaatgaattaaaatatgcaaggcactttggatgattcctggcacatattaagtgttctgctcaacaaatgctagctagctattagagaatgaggccaacacttcttcagccaggctcgtttacctgcatatatgagacctttacctacatttttcccatacacccagcacattgtggcaaaatattaaacctgtgtcctgccttgtccagtatttatttactaaattatacccctgtctcctgagtgggctttgttttctctgaatatcaaaggtctccatcagatcctagccaggtcttgcttagaccccaccctcctgtacccaattcccaggcctaccactgtggagctgtttaactttagagatgttccttaacttctctgatcccaagctcccacatatgtgaaataaacataataatggctccttcctcactgaaattaaatatgaacatgtatgaaagggactttgtaaagtgttctgcacttaatataaactcaattaaagtaagtcatacttgttattatttagtctcccaatttcagttttaacattctccaaaatttatgatgaaacatcagtcctaaggacaaaccagggtaaaagatccacaaaagaaagtattggaaaatatccaaatgcaaatcagtactggattgcaacacatcgttcctttattttctgtctaaatgtttaaaagaaaatgaactcaaggcccagatccagggatcactttcccagagctggtctttccacgcacacaatcacacttgagtgggtgcttcggggagatccagaaataggtggaagtatcttctttccgctctgaataaagcaggcctttctagccttcaacagcttgggctgcagactgtggggatgttccttgtacaaagtgtgctatgaagaaaatatagtgcaacttcctgtggcaccagaaaacacacagtgagtgcagagtggagaggacgggcccctcaggacaccccagggagatatccccctttcccacctccactctggggagttaggcccttaaaacacaaatcctatatcaatggggaagctggctctgtgagtgcttccaactttgaactccctggcatcaaacagcagtgcccatgctgtctctatcacccaagcttcatggagaacctttccactcctggggttgggggaacgagaaggggaaagtgaggagggaatcttcttcctgttccagaagaattcatagaggacttctcacctcagagtgacaactttccactttccggtgatcacaaaactggaccaaagaggtgggcaattggaattcactcatgttattgtgtcaactcagttagattcaccaagtgtatgaagcactgggatgctaggccctgtgctaggagataagagacggtggacacaagctctgccctgggggagttcagattgagtaaggttgatggacatataaaaaggatatcaaagttcagggttatacgtgatcatcaggtcattgacatgactcagagatttcttcatgccagtctatggacccaccgcagcagatcgacttgggagcttcctaaaaataaagttctccaagatcacatccctggatatttgtattcagtgggtctcagtatggccaaaggatcygcattttttttaactagaacttgctgagaatcatctttgtctcttctcttttctatgtagtccacaaaaaatccaccagcaaatcctgttgtctcttcccttggaatacattcagggtgtggccctatctcatcacctgcataattaccactgtggtccatgtcaaaatctcttttcaaggagactcttggaagcagcctctaacttgtctmcctgactgtccttgctgcactactgtctgttttcttyccagtcgcccaagtgactcttgaaacacagatggtaggtcatgtttccaagtgctaagaactttgcagggccttcccatctcatggagagaaaagcttcaagaccctccatggtctggccctttgagacctttcagagtctgcttctgaaagctcttccccaggctcccacaaggctctctgctccagccacagtgggccgcatgctgggctgaagtgggttcttgcttctcctgcctcagaaccttggaacttttctgtgcctggaatgctcttcccaratgaggatgactccctcacttctttcaggtcattgctcaaatgtcttcttatcagagaggccttctctgaactccctttaaattagcagtcttattcctgtgccatcactttccatcctacttatgctgctgtattattatttatggcatttatcacactctcataccaccaccaccaccatgtgttaaatattccttggcttgcttgtttattgcccatctcccaccactagaatgacagcaggacattayctgctttgtacactgccagtttataaaactgcctgacacatagaactcgttccataaataatttcaaatggattaattaatagaagtgaggggttaggaaggcttttcaaatgtagtttacaratgcataagggcaggaaaaaatgattaataaatatttctcaagtatatcacacctagcacatcaactctgggtcagaggtggcttacagataggatgggacccgagggatccaggtagagccgtaggttggagggattacaaagcacaaccaatctgagatggtcatcaccatatgcatttaacccttcatggaactaccaatctgctactgccacaatggagtggtatttccatcaaaacatttagtaaaaattaataatagtaataattgaacagttcaggcatttttagataattactagatactaaaacccaaacacttatttttaaagttatttgtgaggtcagttactggccaatatcaggagactctatctggatggtcttttctgcattgtttttttctcattggttccagacctcaggatttgttctactggctgcataagttttgaacatcctgctctgcttctcagactctcagtcatctcttttggaatctgcaaatgctcccaggaaggaagaagccccaaatgctagggtcacctgtctaagtgtagatcttgacaccttagggtttgtactgccttgttagatctccacaactgagtttgtttgaataacttattcttcctatttcagtacacacacagatacacacatatttacacaagtgcgtgcagacttacgtacttatttttatttatatatgtatatgtatatatgtatatgtatatatatatttcttcatattttaagcattagaatcacattgaatttatagatttgtatgttaagtgcagtttaaaatattacattttacttaattcatcagagatttgctaatgtcattaagtattttaaatgcaattttacattctttttgtttacacagaccacaatttattcagccatttctcttactgttaaaaatatgcagtttccatttataaatttttcatgaataaagctacaatgaatattccctaacagaagtttctaatgttctgtctgatgatctcctaaagacagatttctagaggttgggtcagtgggtcaaaagaaatgagtcaaattttgcaacatgttgccaattttcttctcataaatattacagtaaagttccttcatatcagcaaggtatcagattggttttgttaataagaaccagttttctttaatttgagactttgctcacatttttctgcttagattagagcagtattcccctttatttttccccctttttatagtttcattttccacatttagctctaatccattggcatttatttttgcatataatatgaggtgactatcagtccatttttttcccctgtagttgaccaattatcttttttgggaaaattttctttccctttaaacctttgatctttgagctacatgtatcatgtacaaactttttacaatttttattgtctgtttctatacagcatagtctactttattccattagttttgcagttgggtttttctctgctgtgacagttttaattatcatagcattatactacatgttaccttctggttggtcaagacccccctctaatctcttttgttaaaaatttatttgatagtctaactcatgtgttctttcagatatacttttaaatcatctttcaagtcccaaataaaaattccatatgggattttgattgtaataatattaaagctgtaaatcatcttaagtcatgcatatatatagttacatattataactattaacatagttaataatagcatttttaacagaaatacctctcttctttatcttttgtaaagtcatgtactttttttcttttctagctctcatgcatttgttagtattgcttaagaatagttttggtgttttatcttaccaatgctattgtaagatcattgttctggcatattttataaatgataattactggtacataggaaagctattcacccattcatgtatttatttatcaaatatctagaacttattaagwgctgagcaattaattgacactatgctgagcatttatttactgtgctggatgctagttgtccattaatggctaaaacaaacatcatctctgtattattagaactcacaatccagtgcggcagataggcatcaagtaaccaagcaagcaaataatatataattacaatttgtgataaattcacagggtgcaggaataaagtatagcagggaaatcctactttgatatagtgatcagggagtgtctatccgagaaaactataataaagccaagaacagaaggataagaagaatcagcaaggcaagaagtatggagagtagtgttcgaagaagaggagatgacatttgaatgtcccagaaatgataaaaatctaatgaaggaatggaaagtaacagaaatcagattggttagagcaaaatgagtaagtgaggaaaagtacaaaatggtcttgaagaggatcaaacgatcctcactgtcatgatgggaagtcttcattttactattttaacaatgtattatattataataggtacactacatgcacatatacaaaaaccaaaaaggtagagtttaaaaacccagacttcagtttctgtccccagcattacccaataacttattgagtgtgtctgtgcatttaaaaatgatagtacatgttagttctttccttctcccamgcccacttttcaactggatggatttacaatatgaccaatcctctgtttagggtcatttaagttatttctaattatttattattgtaaargatcttattatatcctttgatctttgcacatggatggtcatatttatgaaataagtctacagaattagggttactgaactcatgagtagaaatattrtcaatttttacagatattgccagattcacacatttcaccaactaggtataagagtgactattttccccacaacctagccagtgtgaaatgttagtaatctgggaaattgacattaaaatcataatgggagaccattctgtatccaccaggttagcactgagtattcccactccacaccccagagtcacctttgcacatgtgccccaggaacatgcccacaatgttcagagcagcattttccacaagagaatgggagtggaaataatcagaatgtccatgagtggtggaacagataaatattttgtggtgtattaagtactatttagcagtaaaaataaakgaactatcaatgtatgcatcaaaatgaataaagaaaataatgtttagtaaaaaatgtgattccaatgatataaaatttaaaaacaactgaagtcaaactaagcaatacgagagatttttcaaaatgttcatgcccayttgactccacaggatcagtgattcctcacagttgtttatttaactggatttaaatgatgggtttatggtaagataatatggatttcaaaactttttgcaccaaaataaacttatacaaatgtggcaatgtgtctaaataggattcaacttgagatactaaaaaggataagatatcagttacaaaagaacccctatcagagcaacatgaattctgctaaaattgaagtaaggacaaacgtcaaattgatggggaagctttggtggaagaatggtgaaatcactggtgctttacaaaagttcatagaaagaatgccccagagaaattggcagtttacaaatggatcactcattttaagaaaggatgagatgatgttgaagatgtaaagcccacagggcagacaatccacatcaatctgtgaagaaaaagttaattgtgtccatgtcctaactgaagaggaccaactattaacggcagaaacaatagccaatatcattgacatcttaattagttcagcttacacaattctggctgaacaatgaaagttgatcaaactctacktgatgggtatcaaaatccatgtgcccaaatcagctgcagacaaaagcagagctttcagtggacattttaaacaagtaggatcaagatcctgaagcatttctttgaaacactgtaacaggagatgaaacctggttttcaaaatttgctgaggctaacttcaagtcctatcctaagatgatattttacaaattttcaatatgtgccttaaaagaatttctactatctaattattgaatagcatgtttgtattagtccgttttcatgaggttgataaagacatacctgagactgggtaatttataaagaaaagaggattaatggactcagagttccacgtggctggggaggcctcacaatcatggcagaaggagaaaggcatgtcttacatggtggcaggcaagacagaatgaaagccaagtgaaagaagaaatctctcataaaaccatcagatamcttaagacttattcactaccatgagaacagtatgggggaaaccatagccatgatttaattttatcccactggatccctcccactacacctcagaattatgggagctacaattcaagatgagattttggtagggacacagccaaaccatatcaatgtttcatttcamggttgttaatcatatgagctttccagattatctctatctttgctgactttttaatctgtttggtatataaactgctgaaaattgtkttaaaagagaccactrtgactatagatttataaataattacatagacttttatcttattttgcagtgtatactttgaggctgtgctattaaatgtgtagatgttcagaatttttatgtatttctgawgtattaaaccctttattattgtatagtgaccctacttatctctagtaatgcccttttcaaaaaattatctttagtctggcatttatacaacaaagccagctttattttgttttcacttccaaatttttatatcaatatattttaggactatattttacaaataggacatataatatttctttttatctaatgtgaaaatctttatcataactgaagaatatgtctcctatatgtaacatttttatctgactgttttcaagattttgtttttttagcatttggattatgatgtgcccaggaatagttttgttcacagttaacctatgtagggtttgctaagattattgaacstgtaaatatgtatctttataaaatttataagaattgcattatatctttaaacaaattagtttagccccattctctccttcctttccttctgagaatccaattatatgtatgttaggcccttcaatgttgtcacacgaactactaaaaccttttcataaatcatttaaaaatttttttttggctgtccgtggtggctcacacatgtaatcccagcactttgggaggcccaggcaggcagatcacctgaggtcaggatgtcaagaccagcctggccaacataggaaaatctcatctctactaaaaatacaaaaattagccacatgcggtggtaaacacctgtaatcccagctactcgggaggctgaggcaggagaattgcttgaatctgggaggcagaggttgcagtgagccaagattgtgctactgcactcctgcctgggtgacagagtgagaccctatctcaaatatatatatatatatataggcacagtatgatcaatatatatatgtgccaggcacagttgctcatgtatgtaatcccagcactttcagaggtcaaggtggatagatcacttgaggtcaggagtttgagacctaccagcctggccaacatggtgaaaccccatctctactaaaaatacaaaaattagctgggcatggtagtacacacctgtaatcccagctactcaggaggctgaggcaggagaatcacttgaaccccagaggcagaggttgcagtgaaccagtatcacactactgcactccagcctgggtgatggagtgagactccattcaaaaaagtatataaaatatatttttatttattaatatatattattaaataattattagtaattttttcaaaatggttatattctattggcctatttccaaatttactgattcttccgtcatctatgttctgctgttaatatccagttggttcagatattttctttttcagttctgaaattttcyttttttgaggtttctatttcttttcttatttcttatcttttcattcactgctaaaatatttactttcagtgaatttcattcactgctagaatgtcactgagcaaagttgtaagaactattataatctcgacctgctgattccaacatctgggtcagattagaatagatgtctgttgactatcttttctcttgagattgagtcacattttaatgtttatttttatgtcacataattctrtgctatgttctgggcattgtgaatgctctatggttaagactgaattatcttacattcccctggaaatagtgatttttgttttgttccgtttcactttagcaggtaattaacttgattgaaatcaaaagaaagtctgtcttttggactgcagttcaaatatcagttcagttattttatccttaactcaattgcttactgtcttccctatgcatatgtggttcagataagaggttataaaacaattttaggttttctttcaccgggttcttttctttttggaattctcctcccaccttctggaagctacagtggtctggaactctgttctttgcttctttaagccacctgcattttctactggagttatagctaccacacactgcatgagctgtgacctgttctcaggctaaagccatgaaaataaagaaattcatactttgtgtatgaaattattccatgtgttgaccccttttcaagaatctgtctacttttcttgactgaacagtagttagaaggggggcaaatgaaaaagtaggaagcccaatttaagagtccaggaagcatattttgatgcctagaaatagaataatggaagtggagatgaaaagcaatagaaaaacgtgtttcttttcttgagttagaaacaagacttggattctatccaagaagacccgagaacaccagagtctaaatatagtagtcaatgtattcgaaggcaaaggtattcaatggattcctttcctgtttcttattagtctcttctttttattcccaccagattctccagccccttaaaagccagaggcttttgctggtgaaggggagacagataaggtggagtgaagaagccaaccagattccctctttttcacagcaggtttcccatgaagactccagtctaaacctggggagaaagaagccttaaattggagaaagtggtgaaagaagccctctccaaagggatgacatttgcctcaagatctgaatgaagggcatagctctacaaacatgcgattaaacatatggattactacattaggatttaccttggaaattcatatttatttgtgtattttattgttgcttgtaaatagcttttgttttaagcrcctgaccagactgtgtttattttaggttgtggcccaggcagtgytattcatgtgtatgaacacagctggaatcttcatcagttacctgtcagaccgggcccagcgccaagctttcctggagactcggaggtgtgtggaggccaggctgcgcctggagacagagaaccaaagacaggtaccaactgacaaggctgtgtgttttagttatcacctagccagtctctaaattatatggagytactgttttactcccaaacacgtcctgacttaaaagtgttctcttaaagtttatgtcacaggattccagagtctgaaatagttgtgttagacttacaggtcaaaatgggttggtcttattctccacactcaattcatcgttccccataagaaataaagaggttacagtcacaaatttattttctgacacctttcactgacatctgtgtttgtgaacaaggtcatgattcctcaaaatcatcrgcatgcctatctttgaccctctttcttttaaactgtaaatgtgttatttcagacattttttttctgtttaccaattcaaattagagtaagcgcatggaagaatcttacacatgtctagtctctaaaaccacaacctgatttttagaagagatgtacacaaaaaagtcctgtcgacatgatgccaacatcaaaataagggatacagtaggaaaagaagttggattgcagggggcaataatgtgttccaatttggagaggttaagataaaagaattttttggacatcctgattgggtggatgttataagaacttaaaagtagctttggcctcaaataatatatttctccaaaattaaatttactttcaaagaataaagatttgtccctattaaagmtatttatatattttaagtccatgaatacctttgttctgaacacaattttccaggaggaatatcaagtatgtgttgaaaactgattttagcatcaacttgtagcatcctaagtatatatgctcttggaaattttatgcttgtagatatattatctctacaatcctagacctttttttaactaagcccttyttcttaaagttatgtcttattatttataatacagcacatttcttatttaagactttaggcaataatagtttgcaaaaatcataaagaaagtagcagagaaagactcaacattttcttcatgattaatttgcatcaaatcaccaggaagtcagggatctttgaagtaagtgaagccaggtccgtgtgactctaatggatgagacagacaggtagggccyacctgacaggactgaactcccactgccatctgctgtctcccagggcagaggaaactactgagttttcagatcttactttgactttacaaaattcagaataaggaatttctatgttattgcctaaaataattctggaacctcatagtagtttctctgaatagcccttggaataattaagaaaaataactttaagaaagaagacaccttgtacaataaacatgagtatctcccaggactactgtattatgttcgtgtgcaaaacagatcagttgccagactggcatgtcactctttccatgggatctgtgccaattcagagaatgctgccatattaataatttattcaactgttcttaatgctttgtcacaacaagagctgaaattgtgggtgagttgtatgggatgcctcttatttcgtgtttatgatatattggagacactaaaaaatattgccttaccatctccataagactttttgcttcttttctcatccttcaagctgggtgtcttggaatcactgtgatctaataatctaaaattgtggaggaatcatccaccattctctctaatctttattttttttaagtttgcagaaggaggaagaaaataataatatacagaggtaagagaaagtgacaactagaatttagtgaaaagaccactagagtttgggtcatggctcttattacttcctagttgggccacctaagctacttaactttccaccataggttccttttttatacatgggccaatatctttctcttctgcattatatttgcctcaaatgagatactatgtagaaagcaatacaaacatataagtcagtttcattgatttcttggataaaatacaagaaaaggctatcttttgtggaaggttctttgttcctaggattaagtaaaatactgtgtaggcttcttttagtcctgtgttcacaactatgataagaagtttgtggcatgttgaccaccctttatttacccaagggtattgtctgagatagctgactccacatcatcagtgctaaagttactttccactggcatctgatctctgcttcaggtttccattatccttgagaacttcctcagtaatagacggacagtgtagtctggcagaaaaaacataggctttcaaatgagattgccctggattagtaatttttacttacttactattttagtgagcttgagcaagctctgagtcttagtttgcccatcaatggcatgggaataataacatccttcctgaaaagtctccttaatggttagaattactttgtgtgagatgcccttgcaagtcagtgaagagtttctattagcattattgtgtgtaatgatttatatgaatcagtcaacatagttcagtcccaagaggactcatgtgagaatttattatggattgacttggctcagttgtaataacttagggttatttatatggaggtaaatcaggatgatggctctccttaagtgcatagcaaccagaatcatcgttaggtcccattcatatcttttaaaatatcatgtgtcattgacaaatgaattcccattttcctcttatcagaactaattataatgccataattgttaaaaattctataccctgtgaaggagatgctgtaagaacctaagcgacagcagataccttttccttggataatgatcctaaataagattgatagtaatattttgcaattataaattaagaatcaaataggttatattcaacagaaatgactgggttttgtgggatttttcaagcactcatgatttttatctcatggtaggatacaaaaaaaaaataattatttaatttgttcaaccgtgaattaatttctttatggagggtttattatgtgtcaggagctctgctgagcaatgggaatataatgctgactagcaatcagatcctggccttaaagagtttaccaggtgtagaagaagctgaatgactacacagacatgtatggcaatagtgtatgggtcaaacctaacctggaggcttgcagaaggctatcgaaaaaaaattttacctgagctgacatgtgaataggattcagctcagtggagaagcagtaaagggtacaccataaagagcaaaaaacacatgcaaaaatcttaaaggaagagagaaagtggtttgtcagaaggatttatgagaattcccatgatcattcattcatttattcatctatctattcacccattcattctgtagagagagagcccaataagactgtctttactctgaattggacctggaggatgagtatgactttaattattagaagagagggaagaaagaaattagcaaagataccgatgacaagatacgtatgacctattaaaggacagcaatgctggacactaggttttctctgatatcctgcagcaaattgtgaacctcttaagtggaatattactgctttccattcaataacagatatatatttcctgagtgttaactatgcaccaggcattattcaaagtgctgtgtacaccaaagtgaagamattctttgacagatctgtgttaacagcatgccacactggatctcaatcattgcatgtctctttccccaaactgctatttcaccagcctgtgccatgtattaatagttctgggaaatccacctccctcctaatgtgtctctactcttctgcctcagcattcctttctccaggaggcttgcttttgtctcccaggtagagttgaaattgttttcttgtactcgctgcatgtcatgatagttaagtctattaaagaatgcatcccactttattacatatactactctgtgcttctctctctctccacaatctctaaagactagttaaaggcagctactctacataattcaatggagtctctggtttttatctagcatagtggctgaaatgtaggatcttctgagtaatatttatttaactagttctattgaattcaaactttggctcctagcttcacttctacctatatgaatattaaaataactcctttgcgtaaaaataaagatacctgtgcccattgtgccctccattagaaaactaagtgggaagagcacttttacccaattcaggagagactgggacaggctaagcatacatcttaagctgacttgttaggggaattttccatctggaagctacatcttgaagcatctttctttagggagttagattctaatttagtagttttcataatyctgctgcttctcccaaatgatgcaaatggcccatatttattttaaatattaaaatgaattaattgtttttcttgcagcttggagaattgtataaacctccttatggtaatcatggcatttcgaggtgtctcagaagctctgggggcactggaataaagtttctgatgataccatatgttgcagcagcaggaagattatttttaaatgcagcagatgttttagctgtattaaagcaattctgttaaacttaaatatctttgttagacaatactggtgtaaactggtggttcggacagtagattgagaaarctgggtttcctactgagttctgagttgattagtttgattcattttggtaccttttaacatcttggggactttttaaagttaaaaataatattgattagtacagtagagctttgtcattgttaattcattcagagaatcaaggttgacctaaaagtggtagaaccttrgaatctttattctttctgctccaactagatgggtcttctcattatactccaaaaacctcttacttccaagtcattttctgttattcttcattccttacattcaaagccacccactgaccacccatcatrttcagccttatctgttatcaacatctttcatattcattattctttagtttatactgaaatattcactgtttcttacacattcttcttaccctctacactcatgcctttgtttacacctttttccctacctggtgtaactttcctttcatccctgcaccttatcaatccttcaaaactcagctcaaatgtcacctccatgagagtttcattcatacatttctgtatggaattaatctctttatatattctgctatacccttgccttatttttgcctcctcgtatccttgattttcacagcacttggcattgctgagtcacccsccaaccccctttccttgaagcactctcctctcttaattttactagggggaacttgattttctttccagtctttcagattcctgtttccttcacatatccctcttcctcctccaaacacttaaaggtaggcatccttcaagggcctctccttgaccccttcttttttgttcaygtcttggttctcttttggtgctgtatcatggcttcaaccttcacttccggattgttcccacatcagcatctctaacattacattcttttctgagatccagatgcccaccaccagcaccagcttgatagcctcatcagcatgtcccacatatatcaccagctcggcctgttcatgatcctcccattcccccaaaaagtactcctctttctctgtgatacacgcttgtacctgatcctttcacatcaaccatggtccctatcactgtgggtgctattttcaccatatatgcacacatttttttctatatttcctttactagcactgcctggtttaagtcctctcacaaaatagctttctaattgatgttaaccagttactaaccagtgtatactaatctagccacctgtagtcactcaccttaacattcttcttgaaaaataaatctatttcccttttctccactttccttacgatctatgaaattaaaaaaaaaaaaaaactaaacaaacttactgagctctgcagggcatgaagccaaagccactgctttctttcacctattcttgtccttctctagctgatgttgagatggtgaggcaggaatccattggtttctcttttccagagagcagtattcatatgttagaagtcattgtatatacattctccagacctttctgtsgggtaagaatgtgcttcctccccacaggcagtctaccccacagggagcccactcatgcagtctcctctcctccccacagggagcccactcatgcaggctcctgtcctccccacagagagcccactcatgcagtctcctctgtcccacacagggagcccgcccatgcaagctcttgtcctcttcacagggagcccacccatgcaggctcctgtcccctacccctgataggaagcccagacattcaggctgctgtcctccctgcagggattccactgatgcagtgagcccacagtagccagctactctgcctctggctgaggaactgtggctatagagcagaaagaaaaaataggaagctcatgtctgcttcctttgcagccaagtctcccattcatttgccaataataaagtggctgctttgattgaatgatttgatttggtcgattcctgtctgtcttccatatctatttctcagttggttcatttgagaagggaggtgtatgactaactcacatctcaaaaccccagcacagagtattacacctgtcaggatcatcttcttagtgcctaatttggattatataagacctcacactaaatgtgagaaagccccaggattgctactgcccatagaacccacccaatttcatttaccctgcatcacagcccattcaccacctgtccccagcgtgacattccaatcatgtcacttgctacctctcactttgtactccaacacttcacacagcccagcaaagatgccccgcacgtctatgccttggatttcttgctggtcgttccctatctgtctccctccctctctgcttctctgccattctctctgcccctggagtgtggcctttatggatctcatcaacagactcattaccctctggcttcttgttgggttcggccaatgggaggcactggatgtgaactagagtgtgggaggacagagacgtccatacatttatcttcccatatcctaccctgctggattgtagatttacagtggctgcatttatctaccaaaagccacagttcctattaggcagccctcgcttagagtaaaggatttgccagattccatgggtgtttgtagctgcctgcccttcctaaccttggggtgctttaccatccattgttgagtaccttaatttttcagtaactctcttttattatcccttttgaggtaccagctatgtcctgccaggaaactaaatgacatgccactattgctccattaggatgagatgtyccactcccactctgcatatatttgtgaggcagttcagcagagcagaaagacactgggctagaagtcagaaaatctctactctgtccagtatggtactagccctctgtgtatatttagcatctgcaacgtgcctgttttaaaatgagacatgctgtgcatgtacaatacacaccagatgttaaagacaatccaaaaaaagaagaaatgcaaaatatctcattaatgactttttacaaactaattgaatgttgattatacattgaaatgatatttggaatatatttggttaactagaatatacaattaacaatgaatttcaactgtttctggctaattttttatggaatttttaaattatatatgtggttcacattgtatttctattggacagtattgacctagatgcttgtcccatttctatttctaacttgctagtgtgactctgagcaagttgtcaaaccattttgtatgtgagtttcctcatctctcaattagaaatgataattccttccctaacccacaggagtgttttgagagacaaataacataatgcctgaaaaagtgttatttcagctgtaaagaattctacaaatgttagggctatttctgtgaaaatytcaccaacgccccaatctgatgctcagatgccccgccccccttatgaagcatcctctaatgtttcctgttgtaagttatttctttctttttggcactaagacatttttgttaacatgagtttatcacattctgttttatatcagggttagcaccatgcttcccttcaattgccaggaaggttttgagtggcaagcacagtaccagcgttaatggcctctgatctccctgtaacaattgacttcattcaaagaactgtgtttacccgatgtgggtaggacaccagctcttgtgttccatctggctgcctggttctttgcaatcttcctagcgcattatttgcattttctggcatgacggaagaagtgaaggctttgaagaaaaacaaacctgtatttgattcctagctctaagtctatatctgggtgactgtgtgtacaccaaccttagattcaacatctgtcgaagataataatccctagatctcaagctggttgtaagaaaatcaagcagtatatagaaagcatctgacccattggctgacatagtggggcctcaatagatgagagctgagggtcatggctgatccttgaactgttggatcacccaggccatatcctaagtttcaaagtagaaggtattctgattctagtaacaacagtttttcttcttgttatttgtgttcttattcaaatttggcatccacaagcaatacaaatttttaatgctacccttgattcaaagacagttcatgaccctatgctcatgtgcaattataatttgcatactgaggccatccagaaagcagaaatcaatcaccatcagggacctcaacacctttgatccagcctggaggagctgcaggagccactgaagaactctgtgggggctttttatcttgaaagtctgtgcagataattttgactaaagaaattgaaattggaaacctaatatagcctaactataaaatgctgaagagaagacatgctctgttgccttgatacagttgaaggcacttttcaagagtgrcagtaaaatagagcaggagaaaaataaaataagtattttttaaataacccatgcctaaaatagcttattttagtgggacttgagtatgggtcagttgaccagaattctacatttactattttgcatgagtcacacccaaaatagattggctataaaagaggtaaaataatttaacggcactatctcagctatcttggtgtaaaaccatcctagaatttttttccttctaatcttttgcaaatgtcttgcccacacctcatttgaaagcaatgtttttagaatgaaagttttgagtatagtrtagtattcaactcatttttcatagaaacgaaagcttgcttatcatgaacagatttggaaacaaacattactgcctcttggtaaagaaagataggacacagctagcagacgtggggggtagacttgaaagaaccagctagctatgagtgtttagtgtatactgttgacagcctttcacagtagataggctagtgaatcacttaagtkgggtagggaggccactgtgatgcagtgctattctgtaaattatttatgaaaagtccaaaattccaagtttatcttttaaaaaccttgacactactcttgatcggccattggaatctagaaagttgagacagaggctgagaactatgccgtcaaagcaaaaggaaatctggcatagggcaaaaccattatttcatccttcatttgctcaacaagtattgatctttccttcccaaaacatttgcccttgcagtatttcctatcttagtgaacaaacagcaccacttgtccaccaactcttcaagctcacactacccatcctctccattttccctgacatgcagtaataattatgagcagttaattctctttctcatccatcttttttccacattttttyccaacgtttctaaccctacttccttctccatttctctcctgcatcactgtaacaaccctttggttccctgcaattcattctccaggctgcagccagagtgatccttctaaaatctaaawctagttaggtcatctctatgacttctgtactgggttgaatagtgtccccctaaaatgcatgttcccccgaacctcaaaatgtgatcttacttggaaataggatctttacagatttattcaagatgcaatcacacttgattagggtgggccttaattcaatatcactggtatccttataagaagagaacacagagaatcccagaggcaggagcaggaaacgcacaaaagagcaccacatgaagacagaggcagaggttggagcgaggcatctgcaaggactgctggcagccacaagaagccaggagagtgacatgggacagtttctccatcagggccccagaaaaaaatccaaccctgacaataccttcctttcagacttctgacctccaaaactgtaggagaatacatttctattgttttaaaccaccaaattgtgtggtaattttttatgccagcttaggatactaatacaacttcctattgctgttagaatgaagtcagacccatttcttacctctctcccctccttaaacattgcctggatggaagtaacagtgactggctctgatatagcatttactatgtgtgaggttctgtacttcacatagattacttcattcaatcctcagataaatcctatgaagtgggtgaattttttacctccattttatagatgaggaatttgaaaaacatagaggctaaataacagctagtaagttgtacacctggtactcagacctaaacagtcttctccagagcccatataaccaattattatgctacgatgtccttcaacatgggatgctcttcacaatctacccctctctccactgggagggccctagccctcccttccacatgggcacgctcctttagcctcaaatgacaggaaactcaactcatattggttctagcaataagaagaacatattgcctcatgttactgaatatccaggggcaggtgtacaattgtcacaacaggactgtaatgtgatcaacaggaatacacatagtgatgtggggaaatcagatgagttgtcttaatatagggaaaagatatagttcaacacacactaaagctacccagaggaaaagacccagtagcccatgaaggtgccagcttccaatgaaggctcccacccacagtgatatgtcctgactagactgaggatagtgcgttcttcagggagctccctttgcccttctcacatgggattttatgctcttgtagctcttccaaagtattctaaaggctccagctttctcctttcctacccaccaagtatgagaaaactgctaataatcatagaacattacttattccatggtagactgtcttccgccccaaccagcattagacctaagttctatttctaagcaggcttcaggcacagcttggtccaggggccatctagtacgcttgtttgatcacttcattattcaggactcagcaaaggcattaaaatccaatcaaaattctatactaattgacttttttcttagagycttccactcaagagttctcttcagagctttggtgatagtcaaatacatcttatcaaaatctaattaggttactgcattatagaatacatactgtggaccaagtcctgagttaggtgccggaattaaaaacaagaggagatttttaaatagaatttttttgtaacaaactagagtttggtaagcttggcagtttccaacttagtcttagagttatatatgtcatgtcttcatatctcctctgctggattacaagttccttgatccatggaggaattgtgattttccccctataatatctatcctgatatttaaacattcactaacactgtatcaaatgagtaaagtaataattaacttaaggaacatttccaatgagcatttctctttccccaaatatgtgattattatcaacagatattgaagaatcattttcttctctctttagtaaattagaggctagtttttgatgaattttcatatccaacagagaatgttcttgttgaactctataatccattaactcttctttcttcattctcactgtccaactgaatttgcaatttagatttatgggagccatgtcttttgtatattaattacagggatgtaaatatttcrtctttacaacccctgattccccaacagctcaaagcattttagttttcacacaattattccagaatctctttggaatatgcaagggacatatgatgccttgtgctgacttctatggtaatgtaattaatatttcattatagtcattttcagtttctcagccaagcagactgcaagcatggtgaaggcagagtgaagcttctccactgctctccccagtgcagagcacagggcctgccactaactcattccttactacacgtttgctgaagaacagtttgtcagatgcatgaatgagtagtggaagatatttcacaatagattagatggaatcatggaaaagattatgactcgagagtcagccccatgtgatccactgcacccaagaaaaggatgaactctaaatcagattctgcaacacagagcctgaaaaggagaattcactaatgaatccagatgcctgtgtgcacatctgggtgctgccacttacttgctgtgtgtcctaggacaagtacctaacctctctgtgcctcaatttacacatctgtggaatagtggtaataaatatccctatctcattaattgttatgaggattaaatcacataattcatgtgcaaatcttgaaacatagtaggtgcccaataagagctctcactggcagtggtgtagtccatatttattgcttctctcctttaggcattttctttaattgtgaaatatatacattccacagaaagcaaaatcctcagactaccagagactgaattgattttaaataagtaaagggagaaaccaatagagatgtttggagtatgaaaagaggaaaaaagcaaagaaggttggattacaccttatggatgattcaaaaaacaagagacccactgaatgaatgagtattacaagtattgtccaagtaagctctgttgattctgatattttctgtttttcgagtataagtaagaaaggttggattgatcattgttcttctcatgagcagaaaattgacacaagcttacagttaaatgctggtgtgaaaagtgacaattccatttattaaaggctctgaggaggaggttgcaaacaccatgcgctcacacccgacccgggcagtttctccaggcaatgtgaggagatatagtagtaaaggggtggagacttccagcctctgatcaatttctgtttcggagcactggcctggatggtcatgttttcttgatagctgagatgcagcagaagcagaatacagggttgatgtcctgcgcgatgggacaggttggccttgagcaaggtaatctctgagcttcagtctcctcacttgtaaaaccattttaataattcctaccaaggttgttttgatataaaatgagctccatgtaaaggtaatttttaactgtaaacacactacaaatgtaaattatttttaaaattttttaaatatcatatttgaggaggatatataatctcctgagaatgctgcaagcaaagggcttcttatttgaattttaattatctttcaacttccaaattagctcctccaattgatattaaaatatgatcttcttgaataaatgtgaaaagctcagttccacatcaagataaaatataaattcaatattttttaaatttcagtagatgagtgcataaaatatatatcaatgaataagaaatgacttcagaattataaaaattgaattagaaactaagaattcgctatgtagatgrtggtgttcaaataacctctgaagcatgtattatggcatagggataatcaggtatctatggaaactgtcgcatattaatacttgaaataggcaataatttgctttatctgtccacatgcagtcatgggttaggtagttatccaaggtgttagcatcttccgacacytacaataatgaaatacagtttgctttatcacaagtgcccttatcatsaagccaatgatggttaagcttcaaaggccttcactcgcaagccccttctaaggccttcagaggggccctagcaagttcgcagttatgattttcacagtttttcttaaagagtattctcttaccccacccccaagttatttaagtctcaggacccacaaaacctggatcaatcactactgctatccccttggagtagacagaatgttcttggaggggtggtgaggaaacttacaatgtaaaggtcttttccacaycaccatttgcagttttccaaaagataggtggtggttttttttagcatactgaagtaatattttagtagcttttataaaatatcctgcccccatcacaaattatagcatgcattttaagggattttgaagttactatagtataaaagtaattttcagaattgcgggcagtgtcactgggaattgtccaatagctaacaacaccccaatctatctgtgacttctgatctttcaatgttagaattctttcagcagaagaatttctgagagactgttaactgtatttatagacaacttaatggctacatagacaatagagttagacaggcctggtttggaacaccagctttgcatctcattagctgtataaaattgagcaaagaatgtaactttacgtgcttcagctttcttatctattacattggaataatccagcctgcctcactgaatcactgtgacacttatttgaaataaatgcttgtggtttaactaatttagggactgacaccaactggtaccctttccccatcccccgtgtcactcttagtgtccccagagttcaaggttcttgcttctacaatggaccttgttttgtggttgggagtttcttgctcctgcattccccacagactgtgtgttcttcaggatggtracatatttaactcccagcagcacattcagagcctgtcacatgtcagcatgactactgtttattgaagggaattgaattgaatagtcaaacagagtcaagtacgcatgttctttgggtatggagtgggatggtagagagatatgtggtgcaatatttgcaaatatatggtcagaagaacttccagggtgtacataatttctaagggcctgatgaattttagaaaggatttttgagagtgttgattaaattataaaatgccttccttctcctctcacctctcccaygattaaacaagaggacagcactgttcttgcccatgggcctcggaggtgggtgaaattctctcttgatagatcgaagcttctcttctgaacctggtgaagcagcttcccatttattataaagggcataggtcagaaaaccaccattgccacagctgttagctccagaggtatgtcgccttctagatacaccctggcaatatgtggacaatagccaccttctgaacagccacaaaacttgtgactagacactggagggctgctatttaaaaatccattatctccgtaactgtggttgccaggaatgaaaagcagaagtagctaagaatgctctccttttaaccttcacgttttaaatcttgcaggggtgcatctaactggcaaaactcaagcaacatccagagctgcaaggattctgggaaattaaatcattagctttccagcctcacctattcaggaaggaatactcatggcctttttattttttcaactgcaactcccagtaagaagttcattttacttgatgatttagtacacaaaggcatacaggcatatataaaacaaatgaaatcttcacaaaaaaacttacctttatagttattacagtctgatattttctattttcttctatttcatttttgcctgctgggtatgatccactaaatttgatttcaagctcacaaatgtgtcacaaactccaatttaaaaaatactgcactggctgtgcttggaagagatgtggaggtcttggctaccatgcccaccacagtcctttatgccccattccagctggatctcatcagtctctagtgtctctagctagagccattagcttgtaagtaattttgattcttcaggattcaggcccccaagagaaagcatcccgggcacagggcatctgtccctcatccaagacaggagccagcaaagrctgccattcttgataataaagctcagaagttagggaggtggaaaacccatcaagggataatgggccacacaaacgaagggtgctttgttggataggktgctagtctactctacagacagagagacagctttggaagcactttgtatacacatattatcaagagtattcaaaagagtattggcttgtgtgtcaagcttaccaagttttcaaatctggttctgtcatctgcattgttgagtctcttgagcaaatttcttcatttctgagtcaatatactcagaactataaaacaagatactaattcccactttgtgatatgtccttgaatgatatatagtatctctctggatttattttcttagctataaaatatgcttttttgctccattgagtagctgtgaggatcacatgaggtaagctaggtgacaacagccacacacaacaggagcactcagaagccgttagccctccttcctagtcatgtagcctaatcaaccatcctgtctttccatatgtgttaattmattgtatcaattatcttttgctctgtaaaaaagtaacaccagaatgtagtggcttaaagcaatcaccatttacttagctcacaaatgtgtgttggctggagagttctggtctgatcagctctgctgactctggctgctggatggtatagggcagcctcactcacatgcctagtattttggaagactgtggaccagggcatctaattcttcaccatgtgccctctcatcctccagcaagctagtgcaggtacrttcatatagttgtctcacggttccaagcattgcaaaagaaaacataagccctaatgtacaaacaattttgaagattctgtttatgccacatttgctgttgtcccattggtcaaggcaagtagcatgactaagccaagaatcaacatgtaaggcattagccaaaaggaattattatgcacatatgtgcaagcaatctaccacatttagtaagtttgggttgtccgtgactcccttcccaaaactctacaggatacaactggacaaaaaacacacgtacctacaggcttataggaaaagggagaattttattgtagatactgtagatagttgtgacttgtcaaagaggcaagggatgaaagtaaatgcactagtattagcctttttttctgtttcatgttaagggtttaaagtgtaaaagaaaataaatgtggagaaggatttagctcccacttatgttagtgactctagttgtcattttcacatgagccactccatgagaggctaattatcgttcccattttacagattaaaaaaaaaactgatgcttatctccttatcccagatggtttgggggaaaaaaaaaactgatgctgaaggaaggtcactcagctagaaaatgtactgaaacctagcctgtcatactccagaataaaattactttcttctcacaggtagcataagaccagggtggcaaatgtgttgggcttcattcgtgcggtttcctaaatgaccgccaggaaagaatattcattttaaatgaacaaaacaggtttataaatataagctggccctaagagaatatcaaagtaccctactttggttgccttgatcatttaagaaataccatttttcagactcgggaagctattccaaaatagatattttgggtctttttaagttttttaaatgttgtcctatttctggctttattattattaccttgcaaattgttttttccttacaaagcaaatgaatcaaggtctaagtttgatctgtttcattgtctgtatgtgtatgtgttgcaaattgatcccagccctgttgacaactggaacattaaggtttagcaaaacacacatgatgagagatgacagcagactgtggacatatatttttctgtattgacctatatacactgaaatctcacagctacctcatcagttgttgtgagaactaaatgattcatgtacagggcttgacacatagtaagtgctcaataaragtatggttggtaatggttttgtcaaaatgattgctattctctcttgggcttttgctttattattgaaataatgtattccctcctccttgtaagagtggtgattgtatgaggacacaagaggcttctagggttctattatggtctgcttctaggtagattctgtttatgagagtggttttactttatgaaaattcatagagctgtaaacctgtgatatgtacattattctctatgtaaatcgtacttcaaataagaagagatccttcagtagcccccagtagctttcaagatgaagttgatattccccagcttagtacacaagcctctttataatctggcccttgcctaattccacatccaactatttgaagctccatgaatacatcatctttgtcatatcatcrttgcttcactcatacaatttcttctacttaaaaccattgtcactcttatccatctagctaaagtctgcttgtgctccaaaactcagctcacatatcacctcttccaggaagccttccctgagactagacatccttaattgggcttgcactgtctttaaccttccatccatcactgcatttatcacactcagttatccttattgacttgcctgaagctctgtaagagtagtaaccttttcttcagtaaattgcatcattttgagagtttgaaaaaatatttaatgaatgattatctcaatagataaatgaatgatattatgatgagcaatgaaccccttttaaaattgtgattatagagacatgggaatgagaaaacacagaactgtaagttctgcagtaatatacaaataacattgggttctctatgtgtatcaatatcatgttcagtatccttaattcacacttaaccctcttgtaagaggttccttmtcagcagggcttctgtaactgggaataatactttgacttataaataatctaagcaagagtaccaaatacaggtgatgtctaactctatcaccaggagcttgttattaacatacaataattaacatgacaatgaccacttgttaacacagtaacacaccagagatattcagcaagcaagggtttattgggctcctactgtataccagacttgtgctaaacctaaagaggtgtaagattcactagcctttgacttcagagagcatattaataacatcagtacctaatgttattgaatcctttctacgtgccaagtcttcacaaaaattatcccgaatgtctttctttcatccatccctcatagccaatctgtcacaccatagcaaaagtagatctaaaagccattcacctctctccctgccaccatgttccargtccctgtcatttctcattggacactcagaataacctcactggatactcagaataacctaacgggtctgttttcattcttgcttttctataagccattctgcaaccagaagtgagagtgacctaaaaaagaaacaatgaggaaacacccccaatggctttccaccagagttggtgaattccaactagtggaaccaacacaatatcatctagggcagcagttcccaacctttttggcaccagggaccagtttctctaaagacaatttttccacacaccagggtggagggggatggtttgggaatgattccagtgcattacatttattatgcgctttatttctattattacattgtaatatgtaatgaaataattatatgagtcaccataatgtagaatcagtgggagccctgggcttgtttccctgcaactagacagtcccatcttgggggtgatgagagacagtgataaatcatcaggcattacattcccataagaagcacgcaacctacaccctcacatgcacrgttcaccatagggtttgcgctcctatgagaatctaatgctgccaccgatctgacaggaggcagagctcaggtggtaatgtgagcaatggggagtggctgtaaatacagatgaagccttgtcggcttgcccactgcttacctcctgctgtgcagcccagttcctaacaggccgtggaccagtaccagtccatggcccaggaactggggactgctgatctagggagcaggcaactgagttaatcctgcaaagctgcatggatgtagrcagattaggttgaaagcacatgcatagctgagccagggactattcagaaactcacaaaggtgtcattgtccctgcagaaaggaccctatagttataatttaatgcagaacataagataaatgaacaaaatatattaagatacaaaaattaagaggaaaagacactgcatcaataaagctcagagataatgaccctaataaaatcctggtcccactactcacttgttgtgtgatcttaggcaagtccctaatcttctctgagcctcagtttccttatctgttccctgttggcaggggcggagatgatgcataagaagcagtctcttccacctttgtccacatcattacatacataagaagggttaagatttgctctagggctaaataaagatgctgctcatggttagaggtgactgacctgaagactctggcagccccaagagctgcacacccaggttacaatctatttttggcaaatcattgtggccaggaacacatttgggaagttctgagaaactcaatacagggtcttcacatgacaaaatgatgggagctacaagtgtagttaataataacaatagctacagtaacaacagcaatgataataactatactatgtatattagtcagggttccacagagaaacagagccaagagaatgtgtagatagagagaaaaagaaagagagctttattttaaggaattggtgcattcagttatggaggctagcatgtccagaatctgcaattcaaattctacagccatcagactggaaactgaggaaagagccaatgttgcagttcaaatcaaaatgccatctgctgcagaattcctttctgcttgggagaggtcagcttttttttctctatttaggcctaaaactgattggaccacccatattatgaaggacaatctgctttcctcaaagtccatcaatttaaatgttaatcttgtccaaaatcaccttcacagaaacatccagaataacatataatctaatatctgtgcaccatggcccagagggttgacacataaagttaaccttcacacagtccttaatgacacaatgcttagcagtgttttctgcgtcttgatagaagtagcgaaactcctgtaaaaagatgttttggcactctctaaaaagactttgaagtctttaagccctaagatgtggttaagagaaagattttttccaaagggggctacttagcagtagattcagtgtctaatgtcttctgggcttgcaaatgtgttctttattcctcacatttgactaaatacctttcaggagacctcagcattttccccaagtgtttatcattttattatcaaagaaaaaagtgccttcctctttatttcataatgttagaattgttgctatatcagactaagacctcagctaaagaataccgctgatgtcctaagcattacttaaggttaaactgatcgtgggttattctacatgagaagagctaatcactggagtagggtggagagccacagaggatgtgcatgatgccacaccatctatcaagcagtcacctgggagcaaagactgtttttttcactgccattgtttaaaactgccaaggaatagtgatgataaaaagcagaataactggccgggtgcggtggctcacgcctgtaatcccagcactttgggaggccgaggcaggcagatcacgaggtcaggagatcgcgacccttctggctaacacggtggaaccccgtctctactaaaaaaataccaaaagttagccaggcatggtggtgggcgcctgtagtcccagctactcaggaggctgagtcaggagaatggcgtgaacccagaaggcagagcttgcagtgagcggagatgcgccactgcactccagcctgggtgacagagcgagaccctgtctcaaaaaaaaaaaaaagcagaataacttttagtcattttttttatgattttaaattctctacagaccacggtccctcttattgcctgcatctagtacagaccactcttcattctctctcccccacctgcccatgcccatggcatgtcactgccactaagcatgttacaagaacatatcacactgtgttcaataatctcacaagggagctattattattttacagatgaggacaatgaggtttggagaggttaagtaacttgcctgagttcccacaactaacttacagaacctgagcttctgtctgtgaagtgtggccttggcctgccttatgcattggggtctcctggcacagagtgagcatctagcaatgattgaacaaatcaggaaagagctttgtcccaaagttcccagtttgatgtattttagaactgctaataaaggcatctgagaaaatcttcactccttaaaaacataaaaagaaaaaaaaacaacaaaatatgaaacctgaatacctgaattttgtgactcattctttaaatcacataccatatccatggaatatagactatagagtaatgcagaccatggcctgtgagttgagcactgggaagaattaaaacatatctgatggccactgctattttctaatcacctttataaggagcattttcataaggagctttgtcatttagtctaaacaatcctgggagacaggtattgttctcactctgtagatgaagaaaccaaagctcaaaggaacaatataagttatcacagttacagagcaagcgagttgctgagcttagctgggattcagctcaagcttgcttgacacgagaacactgcagtcttaatatttctgagcagaaccaaaattcctagggtcttagaccactaacaaatagacatgaatgttatccagacttccaccctccttgctgaatcagtctgaagtgaacctacagaatatgmcttcaggagccaattaagcaacagcttctgcaatgctatgctcacaattggcttttagaaacatttatgggtgaaaattccataaaaaaccctttaatatataaacccaaatgccagagtcaagattttggcaacaaaaatttttaattttttttcaaattattaacagttttcactgtgtagcacaattgtcttttcacatatgaggtctattcatttcccctatattttctgggtaattccttttttctaagagtgaaagctttagcaccaatatacaattaaagttcaaaaacaatgattaaaatagagcaggcttgccagtaaatttaacaaacatttgggttgtggttacaatgtgctagatgctatctaattcttttataaatattaactgatttaatcccacaccaaccctataaaatagatgttattattatcatctgcaattcacacaggacgcaactggtacagaggggttcagcaggttgtcccaagtcagagctggagaggggcagaggtagggttcaaacccagagcctagcttcaggatcatgtgcattattcctctactatgctgccgcttgctgtcacttaccatcacttcaggttccttgctttgcttccccccttttagggttagatacttgatgctggtctgggttaggtatttgcctttgattcatctgttccttctacaaacatgcattggcagccttattgtaccaatttatttcctgccctgcccttcatttttctgggacttcccttcttccctctgcacctaacccaccccactcttaacagtgacccccataataaatatgcttattctcatggccctgcacctcaatcatgtacgttaggcaggagtcattgtttgacccatgcagagttcttattcagacatgttaagactgaaactgaacaagtttcctccaaatgcatagacataaggtgcaaggatccagaggtcttagtggctgagaagtgagaggggatgaggaagctagccttcaggagaagcagagatccaagtttaagggtgtcatgatgagtcatgcagactcttttgttcccaaagtccagcctcagtttcacccttagattccataagtcatcccagtttactaatgatcaagcatgattttgcttcaggtgaatactgaggaaaatatgagtatcttgatgaccaaaggagtccagacaaatacagccacttcttttttactaagcttgtgttgggttctggaggtagagaaaacatcttggtctcaaatatttcacattctagggaggatgacagacattcaaacagaaattgcaaatttccttttagctgaaatagtctgtatgggctgttgcttggttaattgaaaaagcaaactaaaatgaagaattatgaaaaattatacataaaccttttatttgtaacttaaacataaaatgataaatttattatctattcttttgaaataatgctgagccatttttaaaaaaacttctgtaaatttccattttacattcaaatgattatcagaaatcaaatattctgataatatcaagtttgaatgtgggttcatgggcatacacattgctagtaagtagagcagctattagtatgttgtaagaacataacattacttaatgaggttgaatgtgtgactctcatgatgtagcctgatgatgtaggcacataccacaggtttatttattttattttattttcaacttttattttagattcaggggtacatgtacaggtttgttgcattggtatatcatgtgatgctgaggtttggggaatgactgatcttgtcacccagtcagtgagcatagtacccaacaggtagtttttcacacgtttccccctccatcctcccttttggagtccctagtgtctattatttccatctttgtgcccatgtgcactcaatgtttaataccattctakatttcagccttggccaagaacttatgactgaatgctcaaaagcaattgcaacaaaagcaaaagttgacaggtgggacctaattaaactaaagagcttctatacagcaaaataaactatcaacagagtaaaaaatgaaagaaatccatttctacagaatgaaatattcacaaactatgcatctgacaaagatctaatatccagaatctataagaatgtaaacaaacccacaagcataaaccaaataaccctttaaaaagtgggcaaaggacatgaacagacacctctcaaaagaagacatacgagaggccracaaacctatgaaaaaatgctcagcatcactaatcaccagagaaatgcaatacaaaaccacaatgagacactatctcacacgagtaagaatggctattattaaaaagtgaaaacataatagatgctggtgagactgtgcagaaaagggaatgctcatatattgtcatagattgttggtagaaatgtaagttagttcaactactgtggaaagcatttttttagtgttgatctattgtttcttacagagaccatagccaaagtgcattagttartatttctagttccttaaaatgtactgagaatttaaaagtactttcaaaattatcagagtgacttccagatttttataayttttttcacagatgtttacagctatcttgccgacatctaatttagtgtcattgttttagctgctcagcattacaaagtcttcccaaagtatttgatttcattatcatgcaaagggcatctctcttttcctatttacttagtcttttatttaatatttaattaaatcacataaatacactaacagatgataaaactaacatagctgggtttgaggacaagctcagtgatttctgttcagcatggggctacagatagaatagaagctgtaggtatttataaatctgtttaccatctgggaacctttcaccctgcagtggcctgatccactgacatgtgtaagagagtgattgaagagagtgggttagtccagtaaatcaattaagacagagagttgattaaatggatgtcagccaagagagcgtctaccacactaaggtggtacaggtgatgatttaaaggttgatgcaggtttcagtgaggcagaaggatgcaggtctacatgaygtacgaggacttgggggaacttcatggaggtagtgtcacttcagcagaccagttagagaaggcatcccaggtacagatctagcatgatcaaaggaatgtatgacccatctgagtaacctcacagtctaaaacattggggtggaaagcctttattttagtgataagcacgtcttatttcttatttctagaatttcttatttctagtttttagtctccataatcttyctgacacttggtctctgtcttgctctgagtgtggatgataaaccatgcagaagcccagcttttcctcctttctgttctcagctatctaaaaccttcccagggtctcacctgctgctgatagaacagccaatcaatcctaagtaactgagttgccttcccacatctctagcatgggcctsctcctgacttactgttgtagtattcatcaaactactgctggacctctctgataccatgactatcatctctccccctctcctgtcatcttggggactaaaccccccatgaagtagaggatcatgtctgccttgttcaactctaaatttatagcgtctaatacagtacattgtcttaagtaggatctcaataaaaaatttgttgaatacataaatgatttaatttaataaaagacagcataccatagcctcagtattgactgttcccctgtgtctgaaacacccttccctagctctccacaggtctagctccttctgtccttcaggtaccagttaaacatcactcccttgaaaatttcttcattgaccattttgctaaagcagccacaaactccccttaaacttcactacagggtttgtttgctgcttttagaacaatggttctgcaaaagtgaacaccatgtctgtttttcttttctgctgattcttcctgccaagsactaagccacttactcctggacttagtaaataaatgattaaatgggtgaactatgatccaagtttcagaaaaaaaaaaaaaaaaagaaagaaaaacacgggcttgggtcttcactacgcacttaccaaatgcgtgactctgagttgcctgatttacttaaactctttgattttcagtatcttcrtacgtataatggaatgaaaatagcatcatattccctcttacrattaatgtgaggttttaattagacaataaataggaagcacttggtgtgctacgtaatgtgtgatcaacaacaataagatattttttgtaactccagaacaagtctctccccagtgcctggaacttggctccagttaatgccactttgcctgcagtggagagaaagagattaataagaagtctctccatttgtgagagcctgaaagtggcaagctcttcctgaagctgttcagaaacactgctgctatgtgtaagyccaaaagtgctgtctgattcacagggctgcsctgatacctttatcttcactgctataagcatttgcataaaataaagatcctgaatccctcactgttttcaccttgacttcccctcagggtgcactgtagcaattgatgcctgtaaaaccattttgacgacttgaatagagtatgttatgtgagatgagaggggaatccagacaggagccactaatggactttgaatcaatccagggtctcttttcatgcaaatggaaaaactcagggagaaaaagatgtgcagaatgtgagcacaaaggccacccagggccacagtctggctccaggagagaagctggtacttctgatccccaaagccagaaaaggatatattgcgccccagcaggagttgggaatcgtattaaagagcaaactttcctattttatttcagagtgtgttttcagggaatttaaatgatgtttctcaggcagtgaacaaatgtgagggaaacaaaagtgttgaaaatgggcttttattagcagactccaggcaaactcccatgtcttgcagaaaatgctttacaragggaggagctgggatgattgccagtagcacaactggctggaggctggcaagcctgggtgcttgagaattttaccagtaaaattttattttcaaagtgtcccatgaaagcatcgatgacttgaggatctaaygagtgttggcacttaaagactatttaataatgttgttttctttttagagacagagtctcactctgttgcccaggctggagtacggtggcatgatcatagctcgctgcagccttgaactcctgggctcaaatgatcctagaaactatttrcccaatgttctctaccaggaacattactggtcactgcagaaaatgcatccatgagctggatacagccsctgccttctgtatgttcacaagtttgctcgagaaatatttacttagaacctgctactctcaagcactgaggaagttgctgaggatcctgagtgaacaaagaagacagaatcactgtcttcaaagcatctgtagtcttgttaggggaaccagacaactaaacgtgtgtgatgagcattacaagaagggaattggaaggataaaaagattctgtgttgcagggcaacagtacatagacctctcaaaggaaagaacattaagcaactttaaagcagaactatgaagtatgattcggagctgtgaacaactggggagagatttatgaagactcataaagactcataaatctcttcataaagagatttatgaagagatttatgaagagatttatgaagatttatgaagaaagtgattggacagtagctcacacctgtaattccagcgctttgggagaccgaggtgggtggatcacttgaggtcaggagttcaagactagcctggccagcatgatgaaaccccgtctctactaaaaatrcaaaaaattagccaggagtggtggcaggcacctgtaatcccagctactcagaaggctgaggcaggagaattgcttgaacccagaggcagaggttgcagtgaaccaagatctcgccactgcattccagcctgggtgacagagtgagactccgtctcaaaaaaataaataagaaagaaagtgattggagattttaaggaagtaaaaggcctcctttgtgctttttgccaaaaatgagagggaagggaaagagtgactggaatcccaaacagtggtcagtaggtattataaggggtttggaatttctcctaagaacagcagggtttaaattcggtaagtggcataatagagactaagaggtatgttaaaaccaaaactaagtcaggcaatctatgggattggcctgcctatgagaatacagattcatatcctccaagaagacactggacatatgatcatatatgatcaccacagtcttcccatttcacattcatttactcctgggccattgtcccatcccagatttgttcactgatagaatctcccctttcccctgcttgaattttcccctgtttgtattcaatctactttagtgttgttgctgtatcttctggcactagcccatccatgctctgtttttattgcaagacaatgtagttgtccygtccactcccattctgaccatttccaggctctttttctgattgtatcattctcgcctgtgcctaggtggctgcagaaaccctcttgctctgtgcaacctaaagtaagacatgctgaaatcataaggtcaagcaaggacctggatttgcttcataatgatakcccaaggatgagtcataaataggtttcatttcctttgttaattccattcaattagtgatgcctgccagtgctgtttttggaggctgagcaagagccagtgttcaagtcaattaatgatgtctacatggacagaagtaagaaagttaagcagtacatgcttgggtcatttttctttcccagtccagagtaaatattaatacctgcctatgggaattctattcaggtagatccaaggttccatcctttacaagtccagaaacccaggagtcctcttgatacccctctttccctctttcacagtcccaattcctacaagtctccctcccatgtgcccatgtttctccatctccactgccatgaatttggtctaagtttccttcacctcctgcctggatgattacattaaccatttaattcctttcattcttccttccctctatattaaccatttcattgaatctactcttttctgtatttcagttggaatgatgttgaaaaaaatctaaatgtgatcatttctctgatctccaagccaaacactttagttgcttctggtaactctcgagataaacacccagcaaggcccagcatgtctccataccctcacgccactctactccactgcacttggctggatgctagccatgatccttcttttggtttctcaaacatgctgtgccctcttcaatcaggcctttgcacatactgctctcttctgttagaatggtattccacaaccattagcacacacataaacacatttgtacatgcttgcatacacacccttcaattaactgttcatctaagttaatcctttcactctggactctcgatgaaccatttgtgtctctttcacataacttgttacagatgtaattgtataattattactatgcttatttgattactacctcaactatcctgccagaccatgcagccttcatgtcttgcttggtctgttcaccaatgttctctatctattgctgtgcttggcactagaaacagttacaggaattatgaatcacagcttcatagctactttattttctgttaaatgttacactaaggtaaattttcaataatgaggaagattaaatgaagaatgtgtaaattgggtatctatactcacccatttttcctgtaaccgagaaaaccatatgaacatttctggtggcaaagtcaacattgtaattactaaatcaaaggtagacaattccaatgtcttccataagacagtttcaaaccttccataaatctattcaaatagagagcatgttaatgcatgtcaatatatactttaatatagtttaatattttaaaaaccggtaatacaataagggtttaattttcaactgtacaatattatacactctctcacttcacaattattacttgtagaacagtggactgaaaagacaaggatcagttaaatcaagttcgtaattacagaaatcctacaacaaatatatattgaggccctatataaaccaggtgttattctaggtgctgggattattgaactgaacaaaagagacaaaaggtatatcatcataaagcttatatttaagtgaaatagatagacaataaacaagataagttaataaaatatatagaaaattaaaaaatattgagtcctaagaaagaaaaaataaataaaacaggaaaagagtgtgatatggtttggctgtttccccacccaaatctcaccttgaattgtaataatcctcacatgtcaagggcagggccaggtggaaataactaaatcataggggcagtttcccccatactgttctcctgttagtgaataaktctcatgagatctgatggttctataaacatgagttcccctgcacaagcctctcttgcctgctgccatggaagatgtccttttgctcttcctttgtcttctgccrtgattgtgagagctcccagccatgtggaactgtgaatccattaaacctctttcctttattattacccagtctcagatacgtcttcattagcagcgtgagaagaggctaatgcagagcacatgaaatgagaggccaggagcatgtgaccactgagatatgggcataaggggaggtctccacgagagggtaacttttgcataaagacctcaagaaagtgggatgcattcattgttgcttatgcattcaattttctacaattatttacaaactgggctgttttaatgtctgaaactctctctttttactacccacttgcttataaagcatcatttatgaacaaatagatttattcacatattttttgtgggcgttggggtatgtcctgggtcctcccaagggattatgttgctcactaagcatcacttttcccacatgkcgtaacccaaagacatccaggagaatggtgcaaactattggtagatctaccattctggggtctggaggacggtggccctcttctcacagctccactagatggtgccccagtagggactctgtgttgggcctctgaccccacatttcccttctgcactgccctagcagaggttctccatgaatgccccatccctgtaacaaacttctgtctgagcatccaggtatttccatacatcttctgaaatccagaaggcagaggttcccaaaccccaattcttaacttctatgtaatcgcaggctcaacaccatgtggaagctgccaagacttggggcttgcaccctctgaaaccacggcctgagctctacattgacccctttcagccacatctagagctgctgggacacagggcaccaagtccctaggctgcacacagtatggggaccctgggcctggcccattaaaccattttttcctaggyctctgggtctgtgatgggaggagctgccatgaagacctgtgacatgccctggagacattttccccattgtcytggggattaacattcagctcctcgttacttatgcaaatttctgcaggcagcttgaatttctcctcagaaaattgktttttcttttctatcacatcgtcaagttgcaaattttccaaacttttatgctctgcttcccttataaaactgaatgccttcaacagcacccaagtcatctcttgaatgcttttctgcttaaaaatttcttcccttagataccctaaatcatttctctcaagttcaaatttccacaaatctctaggacagcagcaaaatgccaccagtctctttgctaaaacacaacaagagtcacctttgctccagttcccaacaagttcctsatctccatctgagaccatctcagccaggaccttattgtccatgtcattatcagcattwtggtcaaagccattcaacaagtctctagggarttccaaactttcccacmttttcatgtcttcttctgagccctccagactgttccaacctctgcctgttacccagttccaaagttgcttccacattttggggtatcttttcagcaacgccccagtcccggtaccaatttattgtattcgtctgttttcacgctactagtaaagatatacccaagactgggtaatttatacaggaaaaagggttttaattggacttacatttccacatggctggggaagcctcacaatcatggcagaaagcaaggaggagcacatcccatcttacatgaatggcagcaggcaaagagagaatgagagccaagtgaaaggatttttccttatcaaaccatcaaatctagtgagacttattcactaccatgagaacagtaaggaagaaactacccctgtgattcaattatctcccaccaggtccctcccacaacacgtgagaattatgggagtacaatttaagatgagatttgccaaaccataccacaaggcattattctgggccttggatacaaaaagatgaacgcaaagagctccgagtttaccaactggtatataagcaaacaggtgccatgtggtgtaataaatgctgtgagaaagatctgagcaaagggacatgcttttggaggtagtgactaatccccttcaccacggaaatgagatttaccctcaaatttgaagatgagtaggagtccatgtgcaaaccacaggaaatgacaatggagaaaggatatttaaggacagaagaacagtagcacgcattgtagtgacctgtgctcagtttaacacaataaatagcccataatctcctgctcagaatagaggatgtgaggatagacaagactatctctcactataggatcctacagtgtgtcagggttgggagaagaaaacaagggttagccaaggagagctggacttttccattcaaaaatacaaatctagttccacagatttttttgtttgtttgtttgtttttttgaggcagggtctttctctgttgaccaggctggagtgccgtggcacaaacacagctcactgcagtctcgacctccctggttcaaacgatcctcccacctcagcctcccaagtatctgggactataggcacatgccaccatgcctggctaattattaaatttttggtagcaatgaggtcttgacatgttgcccaagctagtctcaaactcctgtgctcaagcattcttcccagctcagtctcccaaagtgctgggattacaggcctgagcaaccacactcggcctggctctacacatttaacttcagatgagttgcatttaataactgcttccctaggcatttctttgcatcagaaaatctgatgcagagtccatgtgtctgaaaagtagctgagttccacaaaaggaaacccactatgggtcatnnnnnnnnnnnnnnnnnnnncagttgtaaagtttcttaatttttcatttaaaaaatgtttttagtttgcataatgtatggtagcaacaatttttggcaccatttgacatatttccattgatttattttaactgtactattctgttttatttttatttgtttgcattaaggattcaattaagtaatcattgagtatcatgtgtatgttttgtttaactgtagacataattgtgcaccactaattgcagtggtaattacattttcaatttctgaaaatggggcttggagggatttttttaggaacagctttctgataaggtgaaggggaagcttccaactggctctggggtctgatagactagatactggcccttctttgctgtataaccttgagaaactacttctccgagacttcattttctcagttgttmatctacaatgagttatttctgccatggagttatgttgaatgttatatgaaattatatatgaagctcttaactcagtccctggcccacagtagttgcttcagagccaactagatggtagctctgaagtaagaatgcgtatctttccatgccattccaggagcctgtcagtctctacctataaagtctccctcttgaatcttggctgtcttactctctatgtatctatatatctcccatatctagaactgagctgacatgtagtatgttctcaataaatatttgttagatgaataaataaataaatgtttgaaccctcacacatttttcaggaaccctccttagaaactcgtccctcatcttccttaatgaacaatggttctttcctcctcggaggctttgttgcatactgttagctccaatcataggaatatcccacgtgctgccttaatttacaattttctaagagccatgtggatcagataagaagtgattagaatacattttgtaggaagtgcagttgttagagctattttgggaatcaggagaatttggtttcaattctttgctatttatgatctaggtgctcatgttgctaggtaatcagtttactataaccatgtgtttgttttatttggaacataatctgttttatggagctatagtaaaggttgagtataataaagtgcttagtagtgcttgccacaggataggccagaatttctcaatcctacctgagtatcccaaaaacctaaggagtttttaaaaactccaccctcttgaccatttttctcagagtccaattcagtaggtgtgggtggggtcagggcagctgcacttttatgaaccttcaaaacatactgatgaatggtcagatcacagaatmcatgggatagccttataaatatgtccatggacttgaatttcagggaggaacatcttcctaactaggtcctgtgaatgaatagctttcttgtgtctctcttcagttcccatttcttccctacacttggatcattttatgtgctgcatcaccacctttttatctcctgtgccattctcttcctaacataagttcttccatttttctcactctggttattaaaacatcactgtaatacaacactagtgtaaggatgatttgcaatcaaacacttttacaaactgaccgtggggtcctggagtgtgtgtggattgtgtattacagctctatcacttacaagtgcagatgcagtggcatcttaattaaacatccccagccattgacagagcactagtgcccctcacagctgtaattagcacctactcccacccagcagcaattgagagagcagggccacaagtacctgggaagttgacaaatagcacaaatgaacacaaaatggacatgatgttggggcatttgcagaaagcatgcctcttagtcccgtgatgggatagcactcaagagaagaaagggcttcatcatatgtcattcaatgggcatttcattaataaagccttttgcatgagaggcagagtgaagtagaggtgagaggagggagaaggatttgatgccaggcccctcacatattttattgcattnnnnnnnnnnnnnnnnnnnntgccaggcccctcacatattttattgcattgaattctcacagcaactctttgaagtagatgatattattgctattaatatttgccaaattagggaactaaggcacagaaagatgagatagtttacctaatggatatccaatgatagagttggaatctaaacttcttcatcagactcaatccaagacttttcccatctcaccaagaatcccagctaggaataacaagggaaaggaccgtaccctgcaactgccgcttgattaactgttcaggttgtgcaagtaacttaatctctcctggactcattctgtccattatatgaaaatgattatttctgcaagctgattgtcagggtttcgagagaaacacatgaaagaatgaatggtgacaatgcttaatacccataaataactacaaagatatgaggaactgtgatgattagaacgtgcctgtcttaaactgtttgacactatagtaaaccatagaccaagaaaaattttatctctctatagtgatatgcctcaactagataattccacatgacctattattatcatatcaatgataattaccctattttctattattcaactaaaagtattaaacttcatctatcacagtaaaccacgtaaccaagtaaaccatgtgtcagaagccagcctcttgcctagtttccacaacacaaagactttttagaatttaattcatgttgctagttaacccattactttccttttgtctacagtggtgatcacaatagaaatattattgtttggtgttaggaacccactttcaggctgcgtgcgtctcacttcctctcatctttgataaagagctagtgccttgtaagcctggtttcttttgtatgttcgctgtttctgtaagtgtagctcactctcccaggcaactaaagtcaaaactagctatcatggtgggcacaccctttttctttcctgccatctcggttgccagttctatgaatcttatctcacctggacactccaggagcttcccccacctggtccctctgcctccagccttggctcctccccagaacacattctccaaatcccagccaaagtgatcttttaaaacataaatccaattatgtcactctgctgcttagtaccatttagtggctttcagttgtagttggaattaaacacaaacattgtatgctcacctgcaagatctagctacacctccaacctcattgctatcaccaccctccagccacaccattgctcatttctgcctcaggatatttgtagttattatttttaattcctggatttctcattgcactacacaggacagactccttccaaattttcaggtctcaattttaaatatcagttccttggtaaggccattcttaatccctgatatgcatcgctgtcatcaaccattgtactctctcatcatgacctgtttttgcatggcattcatcacattttgtaaatgtgtgtaggtatctttgggtatgtaatacttaatgtatcttccttattagaatgtaagctccaccagagtcagaaccacatccatttggttcaccactatatatccaacaccagcagagtgcctggcaaataataagtactcaataaatatttgttgtattcatagaatggtatgaaattagcaatcccaaagggagttcatccaaaagccccatgacttctccaccctccaccctcccatctgagactcgctggtcagcctaacaggaccgtccctcttcatttgttccaggagcggctcgtgctttctgtgctcccccggtttgttgtcctggaaatgatcaacgacatgaccaatgtggaagatgagcacctgcagcaccagttccatcggatctacatccatcgctatgagaacgtcaggtgagaaacacaacacccttgccccrgctcttgcatgatccatgtgtgtttgggtgctctcattgcacttccgtgacttccrtctgcttgaatgtcagcacctttcctcatctggttgattaattcattacctagtgattattcatcagagagttctacatttccaaattaaggctagagaagaatgtcacagataaaattatatttgctggttgacttactgcctagctctcctacagtaggcgtgtctgtctttacattttgagtgggaaaggcaaacaccttttagactatgataagaaaaataatcccagaatgtaatctgggggtttcaggtgtgatcacatacatcccctccttatattactcataagtgtgtttaaaacagtacaaagaggatgacagtttattttcctttgcaaacttatttttggccaaccatccatctatccatccacccatccatctatccatccatccatgtatcttcccacttactcccccatccatgcatcagtgccctctatgtgcccagcacaacactggacaacatggcatgtactgaaaatcaaagggtgaactscatggtgaggcacacaagctttaaaatcccaattctgcctattccttgtttgtgatcttgggaaatttatttacctgaatctcaaaattcttccctgtaaaataagcaycttagccactttgcagagttttatgtggatcatataagtgaatattaatacaaaatataaaacaggcagagttaagcaagtagtagagcattcggtacattgtagttcatttcagacatgtttcctagtttcagtcaaaagaatccaaccatgactgatttaaaagaaatgtactggccgggcacggtcgctcgcgcctgtaatcccagcactttgggaggccaaggtgggcggatcacgaggtcaagagatcgagaccatcctggccaacaaggtgaaaccccatctctaccaaaaatacaaaaattagctgagtatggtggtgcatgcctgtagtcccagctactcaggagactaaggcaggagaattgcttgaacccgggaggtggaggttgcagtgaactgagatcgcaccactgaactccagcctggcaacagagcaagactctatctcaaaaaataataataataaacgtwttgaaaggttatgtcatggattacagaatagttagggaagaatggagaagtacatgagggaaatgggccagaatgaagcaaggccacagagtgaaaggcataggcaaaatcaagccagagcacttaggccagttaggaggccactgccactgtctctgaccagtccattgcttgtgcaatcaaccctgtccccaaaccagcccccaaaccctgacacagccaccactgcaattccctgtccccaaaccagcccccaaaccctgacacggccaccactgcaattcctcctgcagccccagaaactgacattgctgtctttgctctgccctgacttcctgctcctgctgcttctttgcatctcaarttaaagcctggagcagatgggtctgattggctgagcccagtcattttctttaagtgcctggaaagcaagtctctggcattttcagcttatacagtggaactgtatctcccacccaccaaatatcataaggtaaaactttcccaaacatagagtcagagtccttacattaagcaacttcaaaagtgacaaacctattctcatagttcctttcctcctaatgtcagcaggatagaggacaattttgcacttagcagcatctgtaggtgttctactcctggcatgcaggaacacgcgttttaaaattcagtagagatcatgattctaacacaacccttcagcgggcayagcaggataggtcattcccagggtcttgtccaagaattgagctacactgatttagatgcttgagtttgcaaaacagccctttgtcaaacagcaattccaggaagagatgcgccccagatctaggaattggtcccacacrtaataagaactcttcaatactagttctaagacaataggaacctattaatcataatagaatatggggtttgattattaagcaggccacaaatgccaagagatcataaaaggaggaaaacctggggcaaggaggtggagggcgggacagggagataggtagagaaaccttcctggaagagatgatgattcttcttggctttatttgagacgaagtcagccaagtgaaaaacacaaatacatgaattctgagcaaaggggtcagcagaagtgaaggcagagccacggtccatgcagagaatcataggtggtgttccatattccttccctggtggcaaaatggcttgaccacgaatgcagatccagagaaagcagaaattgcgtgaatatttggggaaaaaataaatatttaattacatactcatctataaatatatacaaatcatataaatttataaataaaatatgtggcatatgatgaaagtacctgtcaccatggagaaagaaggagggaaaaatacctttaaaaagaaaaataaggaaaattcaacaagccagcgcgtccacaccaacatgctcaggtgccttaagtgcaataaacagcatgttcggcggctcgctttctgcaggaatccttyttcagtgctcccgttactcttaagcagctagtttcttctgcccccacccctccaaccccgcccatttattttaagtcattgaactgagttcttgtgctggagacccttttccagaagttcacgccacagtacattaaaatttcgttttctgctctccgtgtctccgcgttttcagagccgytactagggggaggagaattgatgcagaaaccagccgccggccctgttgctcccgggctattctcagagcagcgtggygagatgcccgcggctccgggggtttcgggaagatgaactcagctcggggcggcggggcgtctcctgcccactgcgaggctgcagggtgctaaaataagaccggagccttgaaagcagaggaggacggtccctagcccaagtcggagaacaaagccaactggctgctccacccgcttccccagcccccaaagcaaccccgctgcggtgttgggagcatttttgaaatcatttccaagcccgtcaccctcttcatggtaaactgcctggtgcattattttttctcccttggctttttttttttttttttttaattttgaagactctttcctaaaaaagtgctgtacacatctaagtcttgacttacatttcataccactgtttaccttcatcaggaaagggtatgcttaaaggcgccatgcttgggggcattcgtgtgcccacgtgggctggggtagccacacccttggcaagacttcgactgcatcacctcatccctgtgggcctccgtttcccaatctaaaagctggactctttgaacgctcaarttgacttcagctatcaacctctgagacttctccaggttcacctgaggatccacctggccaccagctttttactggaagtcattcacgctctccatcccacctacccgattgtattgatctttcctgtttttcccccagatacttaagacacttcttgtattcattagggtaatgctatctgctctttcaaataccctttcaatttcagtgatttttaactcaatcaagtttattcatgcaagtgttcactgctgatattactggtcagtgggtgattcaggaacaaaggctcctttgttttgtaactaccatcccttgggcctcaaagttcccagcatttggttattggaaggggaagcagagtactcacacccacttttttttccaccttaaccagaaaatgacgtatgtcatttctgttcagattccattagggagaatcaattccaggtgcccacctagaaacaaagtgggctgggaacagtgcctctggctcaatggcttttcctagtgacaggtggattgactatgcaaatagaggcatggatctggtggacagtcatccttctctgtcatggttctttttcccatttcctattggccctgccaattccatttcatgtacatttgcacatttgctgacatacattttgtgggtctgtctgggagacatgtttgtctttatctctccctatgccatggtagatattttagtgaccaattgtcaaggatcaaaaaaatcctcgtttttagagtcttgctcagtctgttcactttcttgactggctgttaatttccagccagccctgtcaacatgtgtgatcactacatctgtcctgtagactagagtttcacgaacaagcaaaatgcaattgaatggagctagagaacttgatgactttctagatccatccgcatggcagttaagcacttccagattcgtaaaaacttcccaaagaggttatatacccttcatttattgagaattatgcaatgatttacaagttgtcttcttatggtagtcctacagagtagctttaatgacctttgctgtattatcaaggaaaatggaagctcagagaggttaagtaactttcccaagaacacacagttatgatattggaacaccgaacacatctgaaacttagttagtgagaggagtctacacagggaccacgttcctaatgattctattgaactccgcaaaagcttccttggggattctatttgaagagtgactattaggtaacatgacttatttttagccaaataaacaatttatttggctaaaagttggctaaattagagttgaaaattactatggcccccttggtatattcatcctggaaagctacaaattatgccaagaatcaaaagacttgatgatctgagctcagcacctggaggtggcagaacaagcaatggaatgagaaccagggccctggtttctgcttctggtcttttattcaataaatccttattgtacaactatgacttaaaccagtgcttctgagtcttaaatgtgcacacaaatcatctacggctcagttaaagcagattgtggtacagtgggtctggagaggtggcttgagagtctacatttctaacaatttcatgagatgccactgggggccatgaccatgctctgaggaaggaggacttaattctgaatgtttctgttgattggactaaggaaacatgtaatagggccaactgtgtgctgggcaggtgggatgcagaggtgacttcattcttgttcttcagctaatagatggagcacacttagccacatatgattgtgctattgagagttaagtgttatgacagagaggggcaccaacagggcgagaagcttgagttggggataactggctatgcttggggaagtctccagaggggtatagactcttaacatgattttaacacctgagtggggctctgaaggacaagtcagattttaacaggtagcaaaagggggaaaaakctataccagggagcaggcatagcatgtacaaagatacaggtgcataatgtatggtgggatcgaaagacctggagaagtttgatgatattggaacactgaagacatctgaaacttttatgaccttagctctcagggaatccatttgttctttcaataggctgtgagctttataaaggctgggatgatgctatcatctgctcactactttatctccactgcctggtgtatagtagtcatttaattaataagctgttgaatgaataaataaattggtaaaccattcttgccatagacagatggatactagtagctttgggcttatggattcataaagggaatgtgttaaaccaagtgatctaagagcctgtccacttcccacctgtcatagcaatgacttttctttcttcaaaaakagcatagctgagcaataaagaggatggatgccagagccaggcttcctggttcaaattctagctcttcatgattataggcaagatacgtaggcctcagttccataaaatggagaagaacatgataggttctccctcataagttacatggaataaatgagtgaatacatgtagggctctcagagcattaccaagtccacagtgaatactctgtaagtgttgctgctgcctggcagttcaggcttcatcaacagttaggaatgcttttagctacaagtaatacataatcaaatgaatggccatattattttctacctctgttacctctctcttctctttctctctcaaatataacatgcaattatagtataattttgtaaaatgatgataacaaaagctaacacgtttaaggaacatttactatgctggcaattgccaggtgatgtgctaaacactacccactaatgaggcaagtatgccagttatctccagtttacagagctagggcttacagaagttcaggaagttgcccaaggtcatagaattcctaagtggtgagctaagatttgaacccagatctatctagactcaaattctgtgcatatgaccatatgttctgccaccacggaactgtagaagacaatggcagtatagtcactctgccaaaggtagcttagtaaactgaaaatctattggcatcatgtccatgcttaaatcccattcactagctttccatcactttcaggacaaagtctacattcttcatcctggcttaccagccccttctccatcattgccccacctgtatttctgacctcatctctctcttctttctagcctccttgctcagtgataccttctgactggctgcccttgaattactgcagaaccttgatacatacacttattcttccaccagaccctagaatgtactgttctctctgctcagagcatccatcctcccaatcacttcgctcatcacattcttcaagaaccagctgagacttttctctactgggagactcctgatccctctgtggctggtcaccccccaatatgtccttcaatcacagtgatcatcaccctgcactgtttccatttttctttttgtctttccagctccattcctcagactcagcatcttgaggaaaggcactaggtcttatatatcatttaatctaactttctagtccagtgcctagctgaacacatagtaaatatataaatatttgctgaaagaatgagccattcaataattaactaaagcaatagatctaaggattcctaatgatttcatgaatggactttgcggaaggtaaaaatccctttaagtgaggtgcaaaattttgaatgctcgtacatttttgggagagataatccatagtctatgtcaaattcttaaaagggtttgtaaaggagatgaattttaagaattattgaataaatgtggtgactgatgtaagtcaacacattccacgatgtcttctagcccaattacctatttcattaaaactaaattacactcataggctgattgtaagacttgtcattattttaggcaacactaagaaaagatgtaaaaagctcgacacagctaaagtgatcaattgtaagacacatctcactttcagagaggatgaaaaatgagaaatgatcaaatatggtatcctgttttgtgtcctatctttcctttcagaggtccctgagatgacatggtaagataattggagcaatatccctcagtgcaattcaaccaaatggacaatcccagctatgccatgtgccactagtgagatgctgggcaagtctccttgcatctctgagcctcagtttcctcatgggctgaatggagagaactatgcttgccccacagagtaactggatggcttaaccaagagagtaacctggcttttagaaggctttgggaagctgccctgtcccttataccaggccatatacatagaacaagacctcacctaactgaaatctttagtaatgtgagagtattgggaaattaattattctgcctgaggtctcccagatttgccacctattgtcataatttttgagaaatgcctatttacctgccattttgggtacggtacctgtcattgggttcaagatgatgaggttttcggttctgcccctgccccttgtgaccattttactctgtgttcattgcatgtgcattgctgttcattgtgaaaatatggagataattcataaagtttcatcttgcttttcacaagaaattgatatcttcatggtgacaaattcttttggattgtttgcattgcccactctacacagccctgcacaggaaaaaagggcttcctgttgtccccttgtccttcctgagctcctgagtggactctctgctgagatatttattaaatactgagacattcctcctgactctcatggcagcaagagctaaaatctcagaccacaaagacagtttatctgctgggatggtgttgatgtgtatcccaagatggactaaaatattaatatacttcctccccccacccccaccctcttccctgtgtttagtattctttttgcagatgttaaaggatttaccaacctctccacgaccttgtctgctcaggagctggtcaggatgctcaacgagctctttgccagatttgatcgactggcccatgtgagttgaatttaatttcctcctcgtcttttgcaggagtgagggactgcatatggaataaggaaagagaaggattcagccttcttccccaatgtcattaccattctgcatcctgtccctaggcatggaccctgaccctctcacattctggggactgatgttagctatttacaggtctcatgcaggaggtttgtcagattaattttctcaattgagagacggctggttgagtgacaatcaaaccccagtcctttttatctgctttccacgcccctatcattgcttccccttgcacgtggccaggtgccatccagctgcagcttcagtgctcatgcatgcagtaatgatggcctgcagtttcccagccaaccctggccatctgggatgaattagcatgttctcaaaaaccagtaatctgctgggccatcccaccaccatcttgatcaacctaacttaagagctttgtttttagccaacaagacagtaccttcattttccagctgtcttgatcagagctaagctagaaaacagattaaaggagatggacatttgctatcaaaacacagattcatagtcctaaagccacttgagttacgaagtaatatcattatcacgctgtacttcagagtgggctttgggttcaaatagacatcttaatttcctgctgtgtaaagtgtgtatgttagtgccaacttcacagagctgtaatgagaattaaataagaccacatcggtgggagttcatttttagagcatcaaaatgtcctctgttaaggctgcctcactctatgggaaatacattaatacttgcatttaagcacctactaggtattgtacatgctgctatgtgttaggaatatgagaatgatgaaaacacacctcctcccttcctggaattaagtctagttaggtattcattaataggtaaggaatgtaaaatgtgccrtgtgttatgaggaaggtaagtctgggggccatggaaacacagaggtaacacatgacctttagatgagagaagacttcttgaagaaagtgactcttaagctgagtcttaaaaatgatataaataatacaatagaatactgttcagcaataaaaataggattatccactcttacgtgcaacaccaatgaatctcaagtgcagtatgccaagtgaaagaaaccagatacaaaatgctaggtattttatgactccatttacaagacatcctataaaaggtacaattacagaggcagaaaacagataagtagctgcaaggagggctgggaatggagtaagcatatggatagcaatggagcatggggtggggtgatttgggggattacatagctgatttatatttttattatggtggttgttttattattacagttttgtagagagagggcatgaagccccacagtcagacagacatgggtttgaatttgtcaagaaggtgattttattatacataatttatacactaattagcaaggcaaagaaatcagagcaggatattttatgcagaggagaaaacaagcataaagatgttactctgtatttgtgaagaaaccagaagagattgctagaggataaagtgcagggtaggaagtggtggagatgaggctagaaagacaggcagggacttgtcaagcaaccttagtataaatttcagctactgaacagctactagctaggagactgacgggggcggaggaggaagtggaaactgagggatcctcctaataggagggttggttttagctggagggctagggactgggggaaaacatgtataccatttccttttattgttgcatcagtggtggttggtatcagttacacatagctattccatttcctattatggttctgatattttttatcaaagatgccaagatgaacaaaaacggccatccaaaggccattggcagatgtgattaaggtgcatttctggtgtcacagtaaaccctgctgacccagagaaagagaaagggtactttttcaggtactgcgcaagactgaaaagacaaaaccagtccttcccctcaggatgctcagaatctggcaagggaaaatcacatgtgaatrcatagcagcctccacggagagggcaggaagaccaggcttccagggtgctgtgtgtctgacgagaagaggccatcctagggaacttcaaccttatctacagtttcatttttactaggacaatatattcacgtactacttacgtgattacaattagataaaatactataaagttttttgggatttctaactttttagaaaagtacactgatagcactaatgtttttgctttgagagtctttttcatttgtattgagtttttctgcttattaaagttatacatgttcattacataaaattcaaacatcaaagatgtacacaatgcaaagtatacatccctgtgattctaccctgtgaacaatataaccatctttgataatttggtgcattcatctcctaatttttgtctattgtctgtatgtgcagtttcataaactcttgggaattttccaagattttgataatgtcaaagtcatcaagacaagaggaaaggattgcaataaggccaactcaataaaattttcaagaagatcctcaccctactttatttttctttttgaatatktttttccaaagyagkctgtcttcctttatgtgatcttttcaaggtagtttctggtacaaataagttattcagatattactgtcaagtcatctgacagctcatagtatttgatcagaaaaatgtgtctgcaaattgacagaccttgacagataagaatccaggcctttaatgtattatatatattacatacattttatttttttgtataaaataattttatataatatatatgcgtatatacaaccatgtatttgggatccaaagagttycaaggaggctaccagctccacattttgttggaagaataacaaaccctggacgtgaacatcatcacatcattatccaatgtctgcctcagaygagtaataaactattttacacaatctccttctaaaacacacttttgtcaggagacctaccattctggactttgccataattcctgcagttttgccaagagagagcatggagccccacaatcagacaaacatgggtttgaattcttcttctgcctcttacttgccgtgtggcctttccctcaagcctgctgttcccatccgtaagatgacacgtgacttagaaagtggtcctgaagactgagataggtgtaatgcatttagtacattgcctggcacatagtacatgctcaatgactattagctcctgtccccacttagatttttkccaaagtgctttcacctctgttttcagggaaagatcacagattcagagttggtgagggtgacatccagcccaggttgttactgttagctagctcctctgtagcacaggaagcttcccctctctccactgagatttctgtatctgtaaaacagacgtgactttacctgctctgccatgttcagagttttattgtgaagctcaacgaaaaaagataaggagcagcatgttgaacattgagaaggctacttccaggtgtcagttgtcattgtcattgttaagtaatggccaagcttactctgttgtgtattaaggacaagatagattattttggcacttgtcacatatgaggaattgaaacccacatacagtggcttcagtgtcttatccaaggtcaaacagctggtaaatttctctggaatgcagatgtcagattcttagaccaaagtaatttttgttatgcccctttccctcatccctccctgtagcaaacaggcaacaggccaatccatgcatctgattttgatggtaccaggctttctttcgcataagtctctcataccaacccgatgccccaaaagaccatttgcagatgaagtcaccaatccctgccttccagtctcagtgttcggatctgcaaaatcagagtaagattttggaacactggttctcaaattctccttcatacacaaaaattggaaattttaaacttggcatgagattttaaaaatgataaaagcaatgtagtgagttttcataatgttaaatttatttaggtaaaaagaaaaccttgcctttattctgaagatatgtctttccagtagttctggtgttaaaaatatatttgcttttataagtgatggggatagtagatagtatttgggttgctgtttttggtgtttgttgatggattgttcatactttcttgacaaaaaaaaaaaatgtaccctacaacatctctaaaccctctgatttctttttccataacagtcccactgactccacaaatctgggcactgctagcaccaaagaacaagaaactttctaagttccattctgatcctgacaccctcaaggtcttagaagaaacaactgaaggccttaagcttcttttatttaatgaatcagacctaattgtcagctgtgttgcaaaattagctgcattgaagcagccaatagacaggagcccagatcccctaaaaataatcctgggatggctgtacatgctgtcagagttctgaagattgcatctgggcccatttgggaaggttgacaaggctccagaaatctgacgggaaagtaccagagacagttctgattctcttttccctgtctaatatttgtttttcttgggatagtatatttacttatccattacccaaacataatgtccaactcctggtgagattgggaaaccaacacagtgctttacagcttgctactacaagggcatcaacagtactgttggtctctcagtgggtactttttatcaataactccccttctccagctctggggccctccttttcccacacagccatagaaccataagcctctaggacttcagatctagaaggcatctcagaggtcattcagccccaacaagctgcccaaggaaaccaagaggatatgtcacttgtccatgatgaaaaacagatatgtgaaggagctaggcctggagtccaactcttcctcatagaaagaggcaatattaattgagtgccccatctgccaggccctgtactgagctttcacttgcaccatctcacttaaccctcatagtggcacaaggggacaggccctatgattatccccatttgatagatgaggcacctgaaggccagaggttaggtagtttacccaaagactcacagaaaagacagaggcagtatctgagatttgatcctgtgcagtgtgactcgtaaaccagtgcccttggctccccatgctatactaccttaagttctctttctactagaacctataacatctagctgcttcctatccaatataaaagcatgcattattttcttaatgcttgttgttctttgaaattttgtaagagttgtgtctttaagattgggaatccaccaaactaacaactacttctcaccggtgaaatggagatawaaaacaacccaccttagagggttgttgtgaggattaactctgttttatttatagtgcataataggagctattattagtcatctttgggttagggacaatgtttgccttattataggtgcccaattgatttttaattttttcaatgaacaaacatataaattaataaacgaataaaaggatatataagaagacttagttcctcctcataaagtgcaaatgtccttgctggaaaggaactttatagagttgaagtaataggaattcctaagtgatgtacatttttaagtgcttactattaagctaaagactgatgaaagctgttaattcacagctgtttttgagaagagagacattgcttggggctgaatttgtaggagatactatgagcactctgtcaggcctgaccaagtgacaggtgtgcagaccatagagctagtatatagcaaagcttggatataaccatgtagcttttgagctcaaaacctaatttctttatgattccattccacctctgggtccttcaaacccccatttaggttacacctcaaatattttagaaagacaggtagaagtatatttcaaaggyaggttctccttaccccaagttgcagaccacctaaccctgctygcctctttctcaagcctttctgaagaactgatccttctgctgacatagacctttccctcttatcctgttccttccaggagcatcactgccttcgtattaaaatcctgggggactgctactactgcgtgtctggacttcctgagccccgccaggaccatgcccactgctgtgttgaaatgggtctcagcatgatcaaaaccatcaggtaatttgtgatccccatcatgttacctgggtcttcaatgtgcacgatcacaggccacttcacctaccctttgtggtaaatcatatgtatggtgaaaggcagaaccttttgacttatttcacaaaaactgtgtgccccttagttctcccatataaaccaatgaacctgttagcatcattgttttctaagtttacctcacttttaattatttgtgctacaagtttgtattacaaatgcccttgtggagatgcagcaaggaacaagatgagcatagtccttaccttcagggatgttacagtgcagagagagagatgaatgaaagaatgaatgaatgaataaaaaatttcaatgcagaacaataagctttgtgataaatcaaatccaagtgcttggggaaaatagaggaggaagttaattcaacgtaggatgttggggaaggctttccggaatagaaatgtctaagctgttgactgaaaggtgggtggacattgacaggatcttggaagtggaggggagagttttcaagagaggatggacatgtacagaaaccaggatgtgctgcaatggctactgtgaagcctggggtggaaagagtagtgacagatggactgtaggctggcagcagccagagcccatatgaccttctcagtcatgttaagaggttgcactttatcctatggccaataggaaattactagaaggctgccaccagggttggcytcatggatgtgtggcaagtgcttttggttttattcagcatatctgacaaacagatgatggatcaagggggaaggaattattggggttgaggactctggaactaggctgtgtgtggctttcagacagaatcttagtattgtcagcactccccttgaggtccaaactggttgcagagcctctaagtgtcacgtcctcacaaagccacagcaaaagcagtaacaagaggatgcataggcagaaatacacacacacacacacacacacacacacacacacacatgtcagtgcttgggtgactaacaccctcaaaaactcagacttaattgatctagggaagaccatgggctgtttgtaagcttcttccatgagacaaaggtacagccagccttgaaaaccactgtctttagagagattttaaaggtggaatcagagcataccatggaaaaatcagtataatagagagtttctcaaaatgtagcttcacagatatgaacttttcacatgaagttttcccacctgcagtaaaagatatttccacagacaacccagttttcacaaaggaaacaaactagcaaacgtcatattctcccagaagctaccatgaggaaaaaccacgtttggttgaaagaaggcagtgggcaataggcgtacagcctctaaatgaaagctgtgtagcaaagatggtcactcaacagtcttcaagtggagtgctgtctgtaaactgcagggcctttgctgtcttctgcaaacagttgagtagggtgtgcagttgctgtagcacattgtcttgcaaaaaggagcagcaggaactcaccagaccaggcacagggaggtggactgtcaggagggacacagaggtcatggttctgggtgtcttaacgtcaaaatttgggattctttccttgtctgggtagcatcatatttttattctttcagaagagaaggaatctgaggagcaggagacaaaagcactctaaaaaccttctttctccctttacgccatctcttaatagaattttaagcattatctggccaagctttcctgccctacattaggctaccgccccagactacattaggctgggctggccagcttgrtgatcaaagtggatccagagtaattctgcatgcatccaagcctcttcgaagacagctggattaccattccagcacagggcaaagagactaggaatttccaaaatctttttagtacctttccatcagcagaaggcatgtgtccatagtgacagcagcctacctctggaaaggcacatgtagagctttatcatatctcaagaaaaatatccagttgtcacagtcttcttatgtcattgatcctatggaaagaaaaaattttgagtaacaatttcagaggccttatgcctcatttaagggatttatctgaaagtctcccataaagccaaaaaaatggaatcgggagatgtacaagtgggatgagaatttatggtacttttctgtgaagtgtatgatggaaaccaaaccctttactgtccctaataccaagtaggtaggtagataaagagacccaagatgtcctctctactatctccctgtcttctgtagagatgcggaagtactccactttaggaactatggagagaggaatctatgggttccaacacagagttcccttttgtttgggttttggttaatggaaaaggctgcagatgttttttaactgctaatttggacacttgagagtttttccctgaaaactaggatgaattgtaataatactttaactggtgtaaagggggacaatgggactgcgatatggttcggatttgtgttcccacccaaatctcatgtcaaattgtaatcctcagtgttggaggaggggcctaatgggaggtaattggatcatgggggtggatttccccattgctgttgtcatgatagtgagtgagttctcatgagagctggttgtttataagtgtgtagcacctccttctttgctctcttcctccttctctgttatgtaagatgtgcctgcttcccctttaccttctgccatgattgtaagtttcctgtggcctcgcagccatgcttcctgtacagcccgtggaactacttgttaattaaaccttttttctttataaattacccagtctcaggtagttctttatagcaatgcaagaacagactaacacagactgacacccagaagatcagagatctctacaactaattaggtgtgtgagccttattctgtcaatcagtaaacccatcaacaaatgtttattgagctccactatgtgtcaggaactgggctaagccctagaaatacagtgataaacatgtcacctggaggtctttgtacatgggtgtcctttaggggaacaattaaatttattgcctacaaaatgaaaaaatcagatcagacaactttgaagtctccaccagttctgaaaatctgtgatttatagccacataaacatcagagtttaagcagcaaaactttctacagactttccataaggatttgtatcttagccttaagtaaaagatatgttacagagataacattggaaaataaatgagcatctataatcaaatactttaagatacttagagcattattatttctctttctggagaggaccttattcttcctgatcattttattgaatttaagatctcctttctggagttttgaaattgaacagtgagaaatgattcaaagtctttttcaaactgtatgaatcaaaatctgttgatatccaaacaactccttgattctaatctaagtaacatgaggtccagtattaattattctagttagcaagaaagcatgctaaaaaggaattaataggagccctggaattagataaaccttggttgcaattggctcagacttctatagtttccagtcttactgccaaatatttcactctgaggaatggctggtgaacaatatttgcaccttaatgtgtttagaagaaaatgccagttacatagctttatcaaaaagttaataatcttaaccaattactgcttacacaagatggaattttttattcagctgcaaagttgcttgttccaatttgaaaacttgatagaagccataaagactggaaatgttcataatattatattgcatatatcataatgttatakgttaatawamcatttgtttactggtgtccccaratttcgtgttgaccctctttatttgctgtcagaaatggacccctgtttgaggttttgtctttccctttcagcagctctccttgtccctatttctggcattttctcaaagttaggataccatcaatccccagagtgcagaaagacaacaaggggccagtgctctgttggtaagatggcatttggatttttagtcactgtacctaacaactccaataatttccttgtttaggtgagatctataatttttgtgcaaatggcaaaccaacactcaaaatgaccctagtctcttactcactgatcattccaaacatgtgatagaaatcctctacaaccatagatatgggtaggatagggtgccaatatcacgaaaggccagggtcgtccactgctagttagtgcattggcaggtttcaaagagggtgaggagtagtaaagccagttaatgaaataggactctcttgtgattattctctaacagaaacatcaatttgagcaagtattcatatgtgaaaatagcttcaaaagagctaaggaaatcaggtgagatgtcataatactcagctgtagcacaataataataaaaggcacattaaatgragtaggcaggacaaatttatattatattacccatatcatccttcccccatcccaagcagcacagtgcagaaaaatataccatccatttggggaaaagagaaggaagtgggcataggactttgacttggaccccaacactgggcctgccacagtaaaacccagcactaggcagaccctcatgatcccatataccaggctggtacccacagactaagcctctacacaygccccgatggcagataggaccacacagctcaaggctacaggcttgcttggccagtctgatctcaggcacacaccactattaggttgacattagtggacctgggctctggacatcccttagcaatgggaaagcctcagtggtcctaggcttctggcccacccagaagtaatacccatgtagtagataccatgtttctagcaatgtcactctggctgcagctgccccaggcttctggcatgccccagtaccacacctgccgtagtgctttcccaggaaaatccagtctgtgaagactataataaggacttacttattcaactgagcagggattgaggcacaatgatgaaggtcaaaaatcatcagggaaacatgacatcactaagagataaaataaggtaccagtgactgaacctaaagaaatgaagatgtgtgaactacctgccaaatatttcaaaataactattttaaggaatcccagcaaacatgaagaaaatgcaaaaaaaaattaataaaatgaggaaaataataagtgaccagaacaagaaacttaatggagtgattgaaaataatttttaaaaagaaatctggagccaaaaaatataataaccaaaatgaaaactgcaatagagaacatcaacagcagaatttctcaggcagaagaaagaaattgtgaacaccaacacaggttatttgaaaatatacagtcaaagaagaaaaaagaataaagaagtataaagaaagcttacaagatttataggacaacatcaaaagagcaaatattcaagtcatgggggctttagaaggagaaaaataagataaaggggtagaaagcttatttaaacaaatagtagcaggaaacattccaaacttggaaaaaggtgtaaatatccaggtacatgaaagtcaaagatctccaatcagattcaacccaaataagaatagccaaagaaacataataatcaaactattaaaatcaaagacaaaaagaagatcctgaaagcaacaacaacaataagaagcaaataccatatataggagtcccaatatggttaacatcagaatcctcagcagaaaccttacaggctaggagaaagtgggagacatattcaaagtgctgaagggaaatgagaaacctgccagacaaaaatactatacctagcaaaactgtcctttagaaatgaagggagattaagacttttccagacaaacaaaagctgagggaattcatcaccaccagacttgtcttataagaaacgctaaaggaagttctagctgaaagaaaaggatgctaatgagtatcataaaaacatttgaaagtacaactcactggtaaaaataagtacaaagtaaaattcagaatattctaatattatagtaatacaggatttatgggacaactccaaaagagcaaatattcaagtcctgtgggttttagaaggagaacagaaagataaaagggtagaaagcttattttaaaaaatagtagcagaaaacttttcaaacttggaaaaagatgtaaattacttatatctttgtaatgtaggataaaaaaacaaaactactacaaatgataatacccacattaatttgttaagaaatatacaatattaaaatgtaaatattgatataaaaatagaaaatgctggagagaagtggattaaaaatatacagtagggtgtgtgtgtgtgaccaaagttaagttgccatcagcttaaaataacctgttatgaatatgagatgtttttgtaagcctcatggtaaccacaaagcaaaaacctatagtaaatacacaaaaaatagaagcaagaggctgggcgcggtggctcacacctgtaatcccagcactttgggaggctgaggtgggtggatcgtgaggtcaggggatcgacaccatcctggttaacacggtgaaaccctgtctctaccaaaaatacaaaaaattagccaggcttsgtggcaggtgcctgtagtcccagctacttgagaggctgaggcaggagaatggygtgaacttgggatatggagcttgcagtgagctgagattgtgccactgcactccagcctgggtgacagaacgagactccatctcaaaaaaaaaaaaaatgtagaagaaggaatccaaatataacactagtgaaaatcacttaacctcagaggaagacaaaaggaaaggaagaagtaacacaagatctacaaaacaactagaaaacaattaacaagtctctacatgtaatgtaaatgcattaaattctagaatcaaaaaatgtagagtgccttaatggatgaaaaacaagactcaactatatgctgcttacaaaggctcactttacctgtaggacacacatagattgaaagtgaaggatagaaaaggtattacctgcaaataaaaaacaaaagaaagcaggaatacctatacttatgcaagataaaatacactttacattaataactatgaaaatgaacaaagaaagtcattatgtaatgataaagggatgattcagcaagtggatataacattgtaaatttatctgcacccaacatcaaagtacctaaaaatacaaggcaaatattaatagatatgaagggaaagataatactatattataactatagtagaggacttcaacatcccagtttcagcagtacacagattatccacataggaaatcaataaggaaacatcagacttaagctatcctctcaaataagtggacctaatagacatatatagaacatttcattcaatagctgcagaatatacattattctcaatttcacatgaaagattctcgaggatagctcatatgttaggacataaacaaatcttaacaaatttaagaagattcaaatcatataaagtatattttctgaccacaagggtataacactagaaattaataacaggaggaacttcacaaaattcacaamtacattgaaattaaacaacatgctcctggacaaccaatggatcaatgaaggaacttaaaggaaaattttaaaatttcttgagacaaaattggaaaacaacaaacttatgggatacagcaaaggcagttatataagggaagtttacaataataaacacctgcatcaaaaaagaggatctcaaataaacaacctaacattgcacctcaagggactagaaaaacaagaacaaactaagtccaaagttagtagaagaaagaaaataataaaaatcaggacagaaatagactagaaaaaataaacaaaaccaagagttgattttttttgaaaagataaagttgaaagacctattgctggactaattaagaaaaaaacaaataaaataaaatgaayaaattcatttgatgcatgcaatctaccagaactgaattatgaagaaatagaaaatcttaatagaccaatagcaagtaaggagattgagtcagtaatacaaagtctctcatctaaaaaaaggcccaggacctgatggtttcactgtgaattctatcaaaatttaaagaagaatatcaattcttttcaaactcttccaaaaaattgaagagggaaaactgtttccaccctcattttatgaggctagcatcatccagagaccaaagccagacaaagacactagaaaaaagaaaattacagaatattcctgattaattacaaaaatattcctgattttattcctgataaagaaaaatatgcaataaaattctagaaaaacaaattcaacagcacattaaagggatcattcaccatgctcaagtaggattcatcccaggatgcatggatggttcaacatacatggatcaataactgtgatacatcacaatgacagaataaaggacaaaaccacatgatcatttcaatagatgcagaaaaagcatttgaaaaaatccaacatcctttcatgatgaaaattctcaattaattagagaaagaatgtacctcaaaataataaaggccatgtatatgacaaacccagggctaatatcatactcaataagaaaaagttaggccaagtgcagcagctcacacctgtaatcccaacacattgtgaggccaaggtgggaggatagcttgaggtcaggagtatgagactagcctgagcaataatagaaagatctcatttccacaaaatatttaaaaattatgtgggtgtggttgcacatgcctatagtcctagctacttgggaggctgaggagggaagatcacttgagcccaggaatttgaggttgctgtgttagcaccactgtattctcttcggcagccacaggtgactgctttggttcttcaaattgacctcccccaagctggacatagtggcactggtaatcccgtaactactcagagggctgaggtgggaggagtccttgagaccaggagtttcaggctgcagtgagttatgattgtgccactgcacaccagcctgggcaacagagcaggccctgtcattaaaacaaattttttaaacaataaaaagttgcaatcttttcctctaagatctgaaaaaagacagggatgtccactcttgccacttctattcaatataggtactggaggtcccagctagagcggtcaaacaagagaaagaattaaaaggcatctaaattggaaaggaacaagttaaattgtttctgtttgcagatgacatgattttatatagagaaaaccctaaagactccaccaaaaaaaaaatggttagaattaaacaaatttagtaaagttgcaggatataaaatccacatacaaaaataagtagcatttctatatattaacagcaaactatctgaaaaactaaaaactttctgcataacgaaagaaacgattaagatagtgaacctaaactacagaatgggagaaaatacttgtaaactatacttctgatgaaaggttaaaatccaaaatatataagaaattccaacaactcaatagcaagaaaatcaatcacctgattttaaaatgggcaaaggacctgaatatacatttctcaaaagaaggtatacaagccaacaggtatattttttaaaaagttaaacatcactaatcatcagggaaatgcaaataaaaaccacaatgagatatcacttcacacctattagaatagctgctatcaaaaagtcaagagataacaagtattgaccaggaggtggtggaaaggaaactttgaacactgccggtggaaatgtaaattaatacagtcattatttaaaacagtggcagttcttcagaaacttaaaaaatagaactaccatatgtctaataattccactactgagtagttatgcaaaggaaatgaaatctgtatgttgaagaaatatctgcattcccatgtttattgcagcattatttaccatagccaagatatgcaatcaacctgaatgtccatcaatggatgaaatggataaagaaaaatgtggtgtgtgtatatatatatatatatatatgtaatggaatactattacaccataaagaaggaaatcctggcattttcaataatatagatgaacgtggacattatgttaaaaaatataagctaagcacaggtagataaatacctcgtgatctcactcctatgtggaagctatagaagctaacccatagaagtagaggtggtgattatcagggtctaggggtggttggagtgtggttgaggagatgttaatcaaaagatacaaaatttcaattagataggagaaataaattcaaaagacctattatacatcttggtgactatagttgacaatatattttattcttgaaaaatggtaagagactggatgtcatgtgttctcaccataaaaatgataactgtgaggtaatacatgtgttaattagctagattccacaatgtatatatgtttcaaatcttcgtgtggtatgcaacaaatatatacaattttacctgtcaatgtacaaaaaataaaataaaaaatattttttaaatgcaaagtgggcaagagtcaagtcaatcaaaagtacgagtatgagggaaacctttttccctgtcatttgccttttactgagctgtttgcacagtagcmttttaaaccaagaaccaaaggtttttttttttttcctggaaacaaaggcttgaacaatgagtcatgctagctgttaagaatggcaaaagccacatgtatgtgtgcattagtgtatgtgtgtacatatgtatgtatgagtgtaaatgtatgtacctgtgtggtatatatgtgtgtgtttatatgtgtttgtatgtatgtgcatgtgtgtgtgttaagcattgaagctgaccttggtgattaccacaattctaaattaaaacaatagggttagggtacgatacgctggggctttatccctcaggcaatgaaaagtcactgactcttaaagtagggaagtgacatggtcagatctggatgtcaggaagatgactgtggagagggataactctctctccccttgacactggaatggaggagcagaggccaaagggaaggaaactggtttggggatattctcatactaatccaggggagagaagtaaggatctgaaatagagcagcagctgtgaaatagaaaggatgggatgataacacatcaaagctgagttccaagagtcacccaacagacaatatgtgacatacaaattttaattaaaccaaacatttatcatgacattaaactaattttcaattgactactccaagaattccagtcaggattccattttattaaaattataattcattgctggatgtgattgtgacaaagcttccctgaaagagtgcctattgtactgtaaggtgacatagaaaatatgctgagtgagtgggatgggttggggggcccttgacaggcagcaacagacctaccctgtttcctgcctcttcctgtaattaggtctgtaatgatgggtgggtgacttaacttatagcctccatggcctcgtctgcaaaatgaggataataagatcccaatttcaaataggaaaattcaaataggtagcatgcatgttatcactatggaaatatttttaatagaatattgcaagggaggctgagtttgggtcctggaaaatttgatgcagttgagttacagaaacctattgttttaccatggcttctattctatgcccataaaataatgatagcagtttgagtttctttttgtttgttttgttttgttttttgttttgtttttgagacagagtctcactctgctcacccgggctggagtgcagtggcgcgatcttggctcattgcaacccccacctcccggattcaagcaattctcctgcctcagcctccccagtagctgggactacaggcgcatgccaccaggcccagctaatttttttttttttttgtatttttagtagagactgggtttcactgtgtttctatctcctgaccttgtgatccacctgtctcagcctcccaaagtgctgggattacaggtgtgagccaccgtgcccggacgcttgagtttcttaaacactaactatatcccagatactgagataaatgtcttgcatgtattggctcattaagtcctcataaaaattctagaagataggcggggtgataggccaaatactgaagaactaagtatgtctgcagcatggacaaatcagactagtttagagcaacaatgagaatggatgcaaacaacaaacaatatagctagacaggtttgtcctaactaatggaaggtctggaagtgggctcctactttaccaatgagaaaattggagctgtgtagtgctggacccctattgcatccagtagggatggtackgtgtctcaggctgaagatgagacctagagacagcaaataagacatagggtttacagggggaaattacatatggggtggtctagtggtggcaccctgcacaagaagacaactaccatttgtaaaaagtatgctgtttatacagcatttttacttagtgctctctacctagcaacccccatttcatccaaagcaaagggcgtcagtccccttacagcctgtgtgccaggggaatgagccagaggtttggctgttcttcatggataagcagtggatctccatgttggccactctcagattccttagcttggaactccaaactaacgctcttcttagaccatagggtcaccctcagggtatgcttcagttatggctgtcaggtgcctctgccatacaagctaacagaggttgtataattacctccacctagatcacatgactagtcagtggcagcacaaggggaccaattctggaatcatctgacttcaaagccgtctatcttagtcatcatggtagcccacctcccaactccagatttgtgcaattgctactgatgcctgaaatttgccatcaatacycaaaggatcaacatatagtttaggagatcctacatacattggtacatttctaatactttagcagaactgatattgaaagaggaaaatgtcagtcaataaacatctaagaataacaagataataagccctaatcaaaacagcctcatagtaaattcaatccaccaaaaatacttaattttagaaacatgatattagctagatgaatggcaaaaaagagattgaatgtaattttatttccaatgaaacacttaatgtcatctcatgcatgtctgttcataaaattaaattaattaaaataggtttatataatagattctattacatagattgaaaagtggctccaggtggcttctcttcacatattctatgtctgttttggggagtcctgatcgttgagaagatgccagggctgacactgggctctgtcatatgcaatgtttattaatgatctgcaaaagttgttcttgattaatcttaatgaaaattgcagagcttggtcttttcagtgcaattgctaaaaaagtcataggaatgacagcagaatgccaagtagtaactggtttgtccccaacagttaatcagagtaaaggtcttaatccttgtggcagggtcaccctgccaagcaatatggcaggacaagaaacgaaaaacagaaattatattgtttttactgaaggcaagaatgcctaaacctgcctcccagcctcctttcctttttatttctctctttgttacattttatttttttctatttttttctgtctattccttccttcccttcgtcacttcttctccctcttttcttttctctctttctctctctctctttccctttctttatttcccccaaaaatcccttgtctcactctgttccaaaatgtcattaaattcagcactcataagcctgcttcaattagagtgatgttcagtacatggacagaaatttttatttttagcaaaattatttgtaataatgaaaattgaatatatctagaaataattgttgataaactaatattgatagaatgtttgccatgtgccaggcactatactaaataatctacctgaattacttcacaaataccaaaactctgtgaagaacaatttccaaatgaaactcaagctctgatagaataaaaacatcttctgaccaatgacacacagcttgtaagtgacatagcaaaggctctgaatcatgttcatctttattagcccgttttctgttgcttactgacagaatatttgaawcagactatgcctaaagaaagggaatttatctgcccggccaccaccccgtctgcgaggtgtacccaacagctcattgagaacgggccatgatgacaatggcggttttgtggaatagaaaggggggaaggtggggaaaagattgagaaatcggatggttgccgtgtctgtgtagaaagaggtagacatgggagacttttcattttgttctgtactaagaaaaattcttctgccttgggatcctgttgatctgtgaccttacccccaaccctgtgctctctgaaacatgtgctgtgtccactcagggttaaacagattaagggcggtgcaagatgtgctttgttaaacagatgcttgaaggcagcatgctcgttaagagtcatcaccactccctaatctcaagtacccagggacacaaacactgcggaaggccgcagggtcctctgcctaggaaaaccagagacctttgttcacttgtttatctgctgaccttccctccactattgtcctgtgaccctgccaaatccccctctgtgagaaacacccaagaatgatcaattwaaaaaaaaaaaaaaaaaagaaagggaatttatttcttatagttctagaggctgagaagtccaaggctgagggaccatatctagtgagagacttactgctgctggagactcgctgtgaaagcgcaaggaggcacagggcatcttatgatgaggggttgagtgagctaatgtgctggctcaagcctcttcctctccttattaatccaccagttccactgccatgataacccactaatccattaacccatgaatccattaatctgtgaatggaatcattcattcataagggcagatcccttatgatccaatcacctcttaaaagccccctttcaatactgccacttggagactttctaatacatgaaatatgtgggacatattcaaaccacagcaccatctgatgccataaatgttcaaaggtacggaaatgattatataaattctggcatatgtaaaaaatagaaaaatgggtaacgaccaggtgcagtggctcacacctgtaatcccagcactttgggaggccaaggcaggcagatcacctgagatygggagttcgagaccagtctgaccaacatggagaaaccccatctctactaaaaatacaaaattagccaggcatggtggtgcgtgcctgtaatcccagctactagggaggctgaggcaggagaattgctggaacccgggaggcagaggttgtggtgagccaagatcatgccattgcactaccctagccggggcaataagagcaaaactctgtctcaaaaaaaaaaaaaaaaaagaaaagaaaaagaaaaatggataaccattaaacatcatggtttacattaatattcaatggcatgaaaaatgctcatgcatttaaagtatacatagtagaatacacacatacacacatgcacacatatttaaaccaacttcagcttttttaattttttatttatttttagctacccctgctggaatgggaacctccacttcttaatacatctatttttataaaaagaaakgacataaagctctgtgatgaaattgagtagttttaattttcttctttattctttactatattttttaatatttgggaataatcatgtataactaatagaactagaaaagaaaatgttatttcaaaaaggaaaagtattgacaggtagagatgacaggaaggtgtttgtgttagggttctctggagaaacagaaccaacagggtgtgtattacttataaaaatttgttttaagaaattggttcacaaaattgtggaggctagttaagtctaaaatctgcagggtggaccagcaggctggagatccagggaagagttgatattgtagcttgagtccaaaagcaggctggattcagaatttcatcttccttggggaacagcagtaatttttctcttaaggccttcaactgtgtaaagcccacacacattgtggagggtaatctgatttactcagtctactgatttaaatgttcatctcacctaaaaaaacaccttcccagcaacatctagcctggtgtttgaccaaatatctggatacaaaggcctaaccaaattgacacataaaattaaaaatcacagtgttcctccctcccttaggcaataacatctgcaaaagctcagagttagaatatatggagatgagtcagggtgactatcaaaatgtattaatggyaaaaaccgcaattacttttgcaccaacttagtaatagtaaaaacactttcacttcattggataagtggcagagcctttagaggtttgtgggcaggggagtctagtgtgaccacagctgtctttccctttgaaataccaggagccccacatgcggtggagccatattccattagcatccttggatcacggtgtttttggttctaaatggaaggctcctcacagtgtccctggcacactgtttgtctgttgcttactgtcttcatgtaacacagttctcactctaacccagtgacacttctgggaagaggccacgtgatataataggaaatgcttaggatttagaattcaggagaacttggtttacattctacttctaagaatcttttttttttttttttttttttttaagaaacggagtctcgttctgtcacccaggctaaagcacagtggtgcaatcatagctcactgcagcctggaaatcctgggctcaggggatcttcccacctcagccttccaagtagccgggattataggcaaatgccactgcaccaggccctgcttccaagaattttaaacatgctgaatctcagtttcttcctgaggaaatggggataataatgtggaaggccacaccataaggactaatccaggtttgaatactggaggatagttgaagtgacttcagctcattgccacaacagaaacaagcaagacacaaagcacagaggagtaagggcacaggaagtgggctgggctgtggtgtccctctctgttccatacagagggaagtgaattgcagtggtctcagctgcccctaggaggagaaaactacccagtcacaagccttaaaaagtgatatgcctaggtcagcccctgtctgtttgcaaaagccaactgttaaacttgcaggaattttacaagccagttgacctcaagttggaagcttgaactcatccatgacaaaaatagtgacaccacagaagttgacagacatcacaaatcaggaccttttcttcccaaagagacagttgttaaacatttacccacccaaccctcaagctctgcacccactcttctgcaggctaggagagaggccacattggcactcagagatcaacccctttacatgaaattcctgttgacacagagccatgttcttgctctcactgtatctatgtgcctacagctggcctggccatagcccatcacaacatacatcatgtgtgtggtgtgtgtgtgtgtgtgtgcgagtgtgagttaaataatgcacacaaaaatctttggccaggactccccacactctccacatgagcctgtaactgttaagtgtctgggccatgttaaaaaacagcaaaagggtagatgaagtttcgggttaaatgactctcccagtttggacatgcgatactgaccagtcccacagagctctgtttaaacagagacttctctcatggaacacctaatgggatacacactttctcttttttggagacggactgtcactctgtcgcccaggctggaatgcagtggcatgatctcggctcactgcaaccttcacctcccgggttcaagggattctcctgcctcagctactcctgagaagctgggactacaggcgtgtgccaccatgcccagctaatttttgtatttttagtagagatggggtttcatcatgttagccaggctggcgtcaaactcctgacctcaggcgatctgcccgccttggccttccaaagtgctgagattacggcatgagccaccgtgcccggccaggatacacaatttctatagcactggattagaggttgtccaatggaagggtttgattctggtttttaaaacagtgatttacaaactctttgctccatactctctaaaataatgttgaaagctacatccctcaaacagttctaagttgacatctaaaattttatccaacattgtttatttttactgacaagaaacaaaacaaataatttttaaattaattaaaatgggaataatctcttaaaatatatttcataatatagtttttttaaaaaaataggttttactccctcatttaataaatcacactgctatgggctgaattttatccccctcaaattcctgtgttgaagccctaaccacaaatataacagtatctggagatgaggcttttgggatctaattaggtttaaatgaggcttagtgcccttattagaagagaccccagagagcttgctggctctctctctccaccttgtaggggcacagtaggaaggcagccatctgcaagccaggaagagggccctcaccagaacctgatcctgctagcaccgtaatctcagacttcccagcctccagaattgtgagaaatacattcctcttgtttatgccatccagtctataaattttgttatggcagcctgagttgattaagacccacacaaaatcagagaatcataagaatatttatccctgagtattaccctatgtatcttgaaaattgtaataactccaaaaaacattccagttgtattaaaagaaacgnnnnnnnnnnnnnnnnnnnnnnnnnnnnnnnnnnnnnnnnnnnnnnnnnnnnnnnnnnnnnnnnnnnnnnnnnnnnnnnnctgcagcaggccaggctacagggccagatgtgggctgctagggaatgctgagtgcttccaggcaggtaggacagagggcacgttggaaaaggaaatgcactatacaataaggggcatcttgaaggaaggagaggaaattaacgggaataaaagaagcaccaatggtttcacccccaacacacacacacacacacacacacacacaaactccctgtgcctccctcacccctgagttagggccatttcaggaaataaattgtcctaaaaaatccagaattcagaacttcagaactcccctgagcgggatcaacaaggaaatgctgacttggcgcacagctgctgtcctgacttggtctctattgttcttctaagattccggggcaccagggcaggaagggtcagcaacgctttcatcttcaagaacaccattgctctcacttttctctccctagatccaccctgcttttgaatgtgagtgcagttaggtcttccccattacctttccactggaagggagtgcaagcagcagcaaagtatccaaacaccattcagcttggagtctggcattacctaacacccgtgtgacttaacctctctgggctccagcttccttggttgtaaaatgggaataaaccacattgatgtaagctccatgaatgcagaacttgatytgtctgtttgggtcactgcttatatctttagagttcttcaacagacacttgttgaaagaataaatggatgagctgtatatgtagcctgtggtggaaatgaggatgaaatgaggttattaaggtaaaaggcctagcacaggagaggtaataaccgcatcttaatcctctcagagcctcagtttgctcatctataaaatcaaaatttataatattgataggcatctacctttcagagtcactgtggctatcaaaatgagaacatgaattgggaagcactttgtgaaatcacaactttcatgtcagggtaagcatggtgccaagaccagctcggtcggggagaccttaacccagtggtgctagaggaattaaagacacacacacagaaatatagaggtgtgaagtgggaaatcaggagtctcacagccttcagagctgagagccccgaacagagatttacccacatatttattaacagcaatcattagcattgtttctatagatattaaattaactaaaagtatcccttgagggaaacgaagggatgggccgaattaattgcagcaggaacaygcccttaaggcacagatcgctcatgcttttgtttgtggcttaagaatgcctttaagcggtttccgccctgggtgggccaggtgttccttgccctcattcccgtaaacccacaatcttccagcttgtgcgttatggccattatggacatgttacattgctgcagagattttatttatggccagttttggggccagtttatggccagacattgaggggcttgctcccaacacacggtggctttcaaacattttaagaagcagatggaccctacgtttcatacggcaggctgacactaaagtccagcagaggcaatagaatggatcagggttgaaggaaaagttgggctycatggccaccacaatggcagtccctaccccacaatgactcctgaagtaccctcagcaaactcagatctataagaagggaggctttggagattaatctgtagagactgtgtccatatattgggctgagtcagctcagaccccagtagtccacatacttccttttgtatttccctttaaagaagccatgcagggaagtagaaatggaccaatgggttcaggcttatayacccggggtgaaattctaactagtccatcaataactgtgtgacgtaaagcaatatacctctcgtgactcagttctctyacttgtaaactggctctggtagtgatacccaggtttgttatgaagatgattccatagctgcacaaaacgccctgggcaatgaacgtagttgacctccataactaactcccttgcctttcctttgttctggaatgttcaagggcaccgttttttccaggtgactggggcccaatcaattctgcctaaattgtaaccattgttcactctgtttagaccagtttatgcctaagaactgtgccgctgatgggttggttgaagctatgtctgtgtgaatagagttgatgtaggcagagttttagcagaaaagggtaggtaaagtgatcaattcatcattttattggtctgattcaatctgtgcaattgaaaaatggtattacttccaaaagttagtactaggtactatttttgagtgttcagtatccaccaggctaagtgttttacatacattattttatgaaccaccctaacacctctacagaggaccaattctcttccccattgcacctgggaagactgagacactgagactaaagcaactagcctgacatccacaagcagtaaatggagaagtgtgatgtcagatccgggcctgctttaatgcatgttctatgcctgtgtggtgttgctggggaaatatgtgtaatttgctctagcccctacagcattgggattcctgtctaatgtatagatcaatgattgctactgaattatgcgtcctgtcattcctctagcaactcctatggattaattgtctaaaaagaaccctttgaagcatttaagttgaaagaaaaaatctaaggtccctcattttttaccttataattataacatgcttccttaatagttcagttaaaagaaataatgttgtcaatctttggtttgttaattgttgcatgatttgtccccagctagacagaggtgagcaaaaataataatgataattacgtgtgttttttatttaaaagaaattttgaatggaatctcaccatgaagaacagaaagtagatttgctctgtttgaaaggaggaggtttagggggttatcccctccccaactaggaggtcctaaggcaactcagtggtttctctgggactcttagatccatcttgggacagccaaaggcctgtgaacccagaaagccattgagctttctccattaacttgataaataactttcagcactgactatgtctgtgtgctgagctttgagctaagtgggaatggaaggtggcatccctgccctccagaatccgagtgtctagagaagaaagagaagatgcagatgtcatctatagtccttttctcttaatttgtgactgattaggcacagcaaaacatccctggggctctgctctggaagaactgaacaagacttgtcgctaggagtagaattgtctccattttagcttcaagaatgctccgaggtcctcccctcaagaactgatcttgaaatacattgtgtgtgtttgtggttctttgcaaccacagggtagccttactaatgagtatcaatgtctgtaaattattaattacttttatatagtttcattcttatctttaagtcaaatcccagacacaaaatgaaagagaaagaaaagctatgcagtaaaaaaatgtgaagtcttcttgctatgcttcttgttttgtagaggaaaataaaaatcatctaaatgtcttttcattaagatgctccagtgcattctctgtataatgttaattgcctaatgacattagcgccgtgtgctgtttagtagtctctcaccattagctggcaaagcactttaacatccattattatatccttcggggctcacaatagttctgtgtgtgaagcaatcaggtagtgccttattttacaactatggaaactcagggtcagattaaactatgtgcccaggatcacatgttcaaagagtatgggttttaaaaacacaacagtaccagtttagtcctggaatcctacttaccagctctgggccatagggaaaatcattttactttctcaggctacaattccttcataaatagtagacaagcaactagtccttattataggccaggcactgttataaactccctgcatgtgtttattcacttaatcttgacaacgttattaacattttatcgatgcagagattaaagcatctgtagggaaataaaataacttctctaagttcatgttgccagtcagtgatggaacaagatgagaacttggctgtctagcactaaagtctgtgatattaaccctcatactacagtgacaacagtgtaataaggaaaacatcaattgggactcatgattgtgccagtcaggatagtaacaaacatccctaaaatctcagtgcttaaaacagtaaacatttatttttcattcacactttatgtttatttttcattcacactttattacaggaggggggtgtgatagcaggatatcataacattttatcctgattcaaggaccctggttagaaggcttcatcaggagctccttgactcatgatggtgacacaggagagaaaaaattttaaagactgtggttgatcatggtcttaaagcttctgcccagaagtgacacatattacctctgctcatatttcattggtcaaaagtaacatcaatatccagacaaacatcacatgtttgcacttatttgcagaatctaaaaatcaaaacaattgaactcatggacatagagagtagaatgatggttaccagaggctgggaagggtagtggggggttaggagggaggtggggatggttaatgggtagaaaaaaatagaaaaaagaaataaaacttattatttgatagcccaacagactatagtcaataataacttgattgtacattttaaaatagctaaaagagtgtaattggattgtttgcaactcaaaggataaatgcttgagggaatggataccccattctccatgatgtgattatttcacattgcatgcctcaaaacacctcatgtaccccataaatatatacacctactatgtattcacaaaaattaaaaattaaaaaattatgcagggaggacaatcctactatacacttgaatagtatagtagtgggcatggctgtggatagcacaaatgactcctctcaatgacctcctgcacagaagctcactggaaaagtgcctcagaaactgatgtgctcctctcaaaggctggattccatttcttctcttgccttgtcaattttttttaaatggctcctacagttttcattrtcagtagatataaagtaccatatgctttttaacttgggagttaaagtaaaaacaatgacccagaaaccaggaacttcaccaagatcaagaaaaacctcatccattagttacaagcatttcttctaatgttcacaggttgcctgcctaatgtctaatttattacaatatttccatattctcaacccaattcaactttactttcttatgtaaatagctttgcattaccttacaatttaagaacagagactgcaaagattcaattgagtacatggaatcattcattcattctttatttatttttttcttttaaaaaaggacactgcatgtcttaagtcctactgtatggaaagcaggatgctccaggctgtgaggaatgtaaggctgcctcaggcaggaataatgccttcgaggaccttatactctttaccaaaaagcttggatatatatgaacattaatagaaagtattggacacccaggcatccacccatccacctactcagtaaacacctgctaagtgttaaccacgtgccagatacagtacaatcttaagaggggaacatacagagtagttgttcaaagtccccattctcaattagtttacaggagacagattattataacacagcaccctaattactgttcacccaggatgcaatgagaacacagggaagggtacatagtcagacttggaaatcagggcagcttactggccagagttaaaccaagcttcactctaaaagatggagtagaagctcttccattgaaagaggtaatggacattccagattgaggaagcaccatggtcccagagaggaaagaaggaacacaaggttcagacaatgacttgttgtttggatggctggagtctaatgtgtgcatgaggaatgagaagaataactaagrcactggacagatcatgaggaattttgtgtgccagactaggaattttccattgtatcttatagaccagtagtatctaaatattttgatcccctatttttattaataaaattatatgaagatatgcatatctaataaaattatatttattaactattctattaattatatttaattatattcatatgtttaaaaatatataccataaaatatacataatatagggattttaaaggataatgagaaaataaaaatactttaaagtattttaatttacagtatccaatttaatttaaatattttaatttgattacaawtttaaaawatyttaaattaattacaatttaatttagacttttctgctttcaccatttattagagagcaatgggtttaaacataattctttttaaaaaaaatttttaatagtttgtgatatagtaatgtaaaggtcaggttttaagttcaatttatctctataccaggcttcagtggctatcagagctaaacatatatcttataaatgttttccaatctcataaatggatttaagcccttataaatgggttctgacctcatcagaaatcttcatttagaagatatttaaacattagtaaatgtgcagctctaagaattttgatagatgatataacataactttggttttacaacaaaattcttaaaaagatggaaacatttccaaacttccattctcaaaatgctttcttcagagcatcaatttctttaaaaatcagttactttcttgctcattcttaagtcatcatcttgagttggaagaaayaaattaagcaagtttgtgtgtttttttcaaatatatgctagaaggaatattaatggcgacttattatcacaaaaatatcagcaaatttggaacacttgtcttctgtcaaagacaaatgaatagctcacytttaagtctgacaactcttttaagcattttgaagtcacataatcattgcatttggggggcaatgaaggtttttctagtaattctactacaaagtattatcttctaccatttgattttctgcataaatgacatcatttaatcataaactaaaattgttcaaaatactctgaaagaaagaaygctcatgactacaggaaatcatccaatggtagaaattcttctgtcttctcaagatgcctcctccatacttacagtcagaggatgaccagacatgtatcccctaagtttccaatatcaatctatatatcaaatgttggtaaagcttttcaacataagtaacaaaagctgtgaatggaagttctaacattttcctcctgcatctcaacggatgacccagttcagccctgggatgtaaacactctatttcagagaccacagctctaagtagtaggtcagaaaagagtgatggggtaatgaggtcacatttgtgtttagaaggagcagctggaaaccatgacagtatgggctggaaggaggtaaggctgaggcagggatcccagactcaggcatgatggtggtctgaactaagtcacagaagggctagaaagaaggaaacagttgacattttggttggaaatggaatgtgtaatgaagtatgaaatcaataatctatctcaggttaatgttgggtagaaaaagatgctggtgccattccctragacagaggttacasagcaggttttggaggaaggtttcaaagagcccttaaaagtacagataaaaggctaaggatgttcagagactctttctagttattaaagaacctaagaaggcttcatggaaggggtgacattgaaagtgaagaggtggacgggcgtggtggctcacrcctgtaatcccagcactttgcaaggccgaggcgggaggatcacgaggtcaggagatcgagaccatcaaggctgaggcagragaatagcgtgaacccgggaggcagaggttgcagctccattgcactccagcctgggmgacagagyraaactccgtctcaaaaaaaaaaaaaaagaaaagaaagtgcagagccaacgatgcccactctggtcttatacatgtgtctctccatttacctatgtcaacaggtatgtgcggtcaaggacaaaacacgatgttgacatgaggattggaatccactccggctcggtgctgtgcggtgttttgggactamggaagtggcagtttgatgtctggtcttgggatgtggatattgcaaacaaactcgaatctggaggaatcccygggtaagataaagcaaagcccttttcatgcttaacggttgtcattggcttattttgtgacagtgggtttcctgtgtacagaaattcagggttagatctaggaagcaattatttggaaggagaccagacactgaaacatcatacaactattagcttccaaaatctagtaaaatgcatcagaggcaayaaggatgtggaataacactgaggtgttcgggtctctgccctgcacagcattggtccttagacttggctgcacattcgaatctccaaaggaacatttaaaaaatactagtgtccagaccccatgccagtttatttaaagcagaatctgtgcagaatctattttaagttcttcagtgaattgtaatgggcagccaggattaagacctactgactttccatgcatgatctaggactcagtgaggaaatcaggctcttccttagaaactcaacatttcaaatttggctgtcaaggttggttgacataggatccccaaaggtgctagtggtctgcaaaggccactgcaactaatgtaagtcttgaaaagttgtatcaagattctgtttacacagattggacctaataagatctcagatatatgtgagccagtgtgattttctgcagcctctctttcttaaagatgatggatggatggatggatggatggatggatggatggatggagatagagaaagagagagagagagagagagagagagcacttccacatattccttttcctaccccctagaactgcccttggagtcacagatttctctggtatgtgccatcactccttgcaaactatgtttaatatcaagtaatatgttatcatgggggaaacagacaacaagaggtggaatcagagtaactaggattcccactctgccccttgctaaactctattatcttcagcaagttatgtaaagcatgcacagcacctggcgtgtgattttagtgtgaacttggcttgcatcactctacctgtgtgatctcaggccagtgcttaacttctgagtccaactttcttcactgcaggaagagagataatactacttatgatttgctaccttgtgaacttattttcctcctccatgagagtttgttctctcatctgctataatggcataatccacctcacaggtctcctctgaagattatctcaggcaatgggtatgaagcgcttttttttgtacactgtgcagggacaccccaggtcagttactattcttatggggatccttcactctatgtggtgtgtcatggctgtttgccagacaggtttagaattgaggaaggtctgatgtgtcactgctgggtttcttaaatctttccattctttaggattttcccacaagtaactacctgctgaatttagacaaacaagttagccaattcatctgtgtttccaggcctgtatcttaaaagcatcaccaaatggggaattgcccatatactcaatagattccttttgcaaaccttagaggatgctttgggggtttgtaagatactgctttgatatctggaagccagtttagctattgttctcaataacattaagaaacagaagagtgaccaagtttaaatcagcacatcaccatgcaatactacaaagccataaaaaggaatgacatcatgtcctttgcagcaacatggatgcagctgaaagaaattatcttaatttaaataatgcagaaacagaaaacccaacaccacatgttctcacttctaagtgggagctaaacattgagtacatatggacataaagacgagaatagacactggggcctgctagagggagaagggagagagtgggacaagggacgagaaactacctgttgggtagtatgttcactacctgtgtgagggttccttcttaccccgaacctcagcatcatacaatatgctttgtaacaaagctgcacatataccacctgattctaaaataaaagttgaaaaaggaaagaaacgaataaaataatttgtaaaaagaaacagaaaagtgactgagtttaaatcatctttcacacccttatttttcatatcatgagtcatgagtctgaaccgtgggtttactacttaccagttatgaagtctggaagattgtggcaagtacttcatgcccttcccagtttcttcactgtaattttggactgaaaacattatccgccttaaaaatgtagtttcaaatatgatagtgcttataaagcacgtagtctagtcttctattcagtatccatctctgcttagccatggcatgttgtcaatgtgcaaaatgcaggaatgtcaaaacgggaccccagactcaccatggtttgatattgttttatatttttccacttttttattgtcttcttctttaacaccactgagccttgggtttctagaagaacggttctcaaacctcagccttggaattacccgagagtttattaaaccatagcttgctgggccccactgccgagtttctggttcagtatgtctggcatggaactcaagatgatgctttctaccagttcctggtaggaactgctggccttagtaccacaccatgaagatcaccatttttgaacttgtgttaaatgaaataatgcatataaagtcctttgtcctgtactcagtaaatatttattgtggttgtgctggtagtagttaccatataatacagttccagggtggtagagagacgctgaaagtaaaagttcttgtctcaatccagcactgccactaaccactaatatgatttggggccaaatatgtacttgttacttctgggccagtttcagcatctgcaaaaggagacaaagaaatgtctaatacctaaggttgttgaaagaacggaaattatatgagataatccatggggcacacagtaacacctttggctactagataacatttatgcaaaacaagagttacacaattgttaggtcttaatttagtatcatgactacttttattatatcctagcattaaaatttatcagaaaatgccaagtttacttgactcatttccttagaaagaaatgcctgaaaactgacacatttccttagaaagaaatgcaatcttcagaatctcatctgcaaatgtcttaccccaaagctcaagttagtaacaaggatgaaaagaaacatctaaaacccagtttctaccaaaacatttaagtgcatattgattagcacttcagcagaagaatcagtgaaggcaaggatctctttcactagtgaaaacataatattgatttaatacatggaagtatttgtccccttgcatactgacagcagaataataaaaatagaatccagagaaatgctaaaaggggttgatatgtaacttaattatcttaaaagaaaatcaaccatggtactttagaaaaccctcctaccaggttcattttgtctaggagaaaaggtaagcttccagtcttaactcagattcatctgagaaagcggatggggacttccatttcatggaaggtcaaacgatctgttattctcccaggtcaatattattgagttcatrtgtattaacaaaatgcatcttgggaatattttgtatttattcagcacatttctcaagagagtgaaaacatctttcacacatttatttttaacatcttgcacttgaaatcaatcaagatatttatgtggaagatgtggagaacatgaagtatcagaaatgatttgtttgtagtttctggtttttcacatgttctttgcaatgaactattctttctgtaaggagggatttagcagaatgggttagaaggatgagagggagtagcagagctaatactaaaagtaaactgcattttatttaattaatgaatttatttattttttctaagacagggtctcactttgtcctccagaatgaagtgcagtggcatgatctcggctcactatagcttcaactgtctgggctcaagcgatcttcccacctcagcctctcaagtagctgggactacaggcatgcaccaccacgcccagctaacttttgtatttttttgtagagatggtgttttgtcatgttgcccaggctggtctcaaactcctgagctccagcaattcaccagtctcggcttcctcagcatgagccactacagtgcatttttaaaagccactctaaattttttttaaaaacttttctgtttacttggatatattgttcttagcattccaaaagccaatcaaaatattaagcattctttcattcaaatgaacactaaagtaaacttaggaagatgacttttgagcagaattggacagtaggarattgttagtaagcaccaaatagtacgttgaatctggagaattgccaattacttgaatagctggagagagcrtaggagagctatattagaggagtgtcagaaaatgagctttgaagtgacagagccagagaatgaaagcttggaggccttattcagaaggcctgacaatagtcttctgcaagccttgagaaggcatggaatacacaacagtaatatgatgacaatggcattttttagaatactcttaataacttacatatttgcttttatagtgtatatgttgtaccatgcactgttttgactaccttacacaaatcaactcgtagaataatcacaataatagtcagagataggtgttattatgtttcccatattatgggtaagaaaatggactgatagaaaggctaagtaatttgcccaagatctctcagctggcaagtggcagagctacggtttgaatctaggagatctagcaatgaagtccatgtttgtaaccaccttaccttgctagtctacccagaccacactataacgcaataagtagtatgattgagttagacagttacgaggacagaaaaactcttccccagaagaatttaccatgtgaaatttccatgaatcaagtttgatcctcaaggccctgatgtcatatgttattttgctaaaaaagaagcctgagtcatgagccacagtggctgacaattgtgcagccatgagtcacttcacttgtgagtgagcccagccagctgccagcctgcacatgtccacagctttgttctttgctccttataatatacatgttataggggaaattgtaccctacagtggttttcccaaaggaccctcagtgcagccctatggacttatcagaatcacccttgagaagaatatagacaagttggagaaacaagttacaaatacatgaagattgaaatgataggacaggttccaagacgaagaaagaactgtttttgcatggtgatttggataatgattgccactggggttcagaaacatttgcagcacttgtttttccaatataatcaacacgactgaaaaaaaaatcactgttttgtaaagtttgctgggatcaggctgacaatcataagaaaagccaaaagatgtgcttaggtgtggctcagaagggctgtattttatcagaggcagcagtgtctcttgggacgatgtccgtgatactgtgctcatgaatttatgcttctattttcttttattctttctactttttaggaagacaagtattgtccctgaggacatgtcctaataatacccttgtgtaacctggtgttggttttgtacaggtcaaaaaaatatagcctttgcaggcaacatcaggagygtgtaatgacctatgccttctacacacaggaggattcacatttccaaagccacgctggactgtctcaacggtgactataacrtggaagagggccatggtaaagagaggaatgaattcctgaggaagcataatatcgaaacttacttaattaagcagcctgaggacagtctgctgtccttgcctgaagatatcgtcaaggagtcagtgagctcctcagaccggagaaacagtggggccacattcactgaaggatcctggagccctgaactgccctttgataatatcgtggggaaacagaatgtaagtcctctcttcctccttctgcttggccatgaatgcatgctcgtgtgcatctccaatccagacacctcagagaaaactgattcatctttaaccttttctccaatgaacaccataattgcaaatgatcaaactatctctctgtctcctcaggacagaattaacctcgtatgcaatttcaggaaatgccagaaatgccagagggttcctaacaccctctctctctctctttttttttttttgtaacctagctaaaaataaatattatgtgaagctgaattgtaattttaccaaaaaaaaaaaaaaaccactcatgttggaaaaaataaaccctytgttattaaactaaaggggaggatcaagtacatgggaatgcccctttttcggtagctggccatcatcagttctgtgtcaccctctgagattcaaaatcaggggggcactgcwgatttggaaataggaaaggagcaccaagtgatgcctagagttagggagttcaggaggagcatgcaatttcaaagccacccacatgattctatttttatatagcatggatttgcatcttctatgaaggacagggctactaagtcagtacataaggagtagatcaccaataaccaaaattctttttaaattatttattcaaatattgaaatcacagtaaacccaatgagatgctcagactccaagaggcacttagagaactgaggctgagccaggtcgagaaccaaggtggacacagagattctgttctcccagaatgcttgcttggagccatggcaaaattacctgctctaatatggattttccctttaacctcttagacacagcacatttagttgaattcacataagttcaatgatgtgactgtactatacatttttagagaaagaaataaaaatagccaatatataacacttatctgacagttatctgacagtttctgataagatcctcgaccaagcagaagctgagagtaccatgaagtacccagccaatagtgtctggagttttatgaagacatataagggttaatttttaaattccatagacctcaacatttctcattaacttatagataagaaaaatctgtctgcctaaaaaaattttaaatggaaaggttaaaatgctgaaagtctcccctcttttttctgcatttgaaagtttgatggggcactctgagactaggctgtctttggtttctttctggatctgtgggggaaaaactatgagaaaatgcatgggccagattccactgggaaaagctgcaggttgaacctaggctgcatgccttgcaagagttgacccttaggtcttcgacagctcttttgtgagtgtttaatttcccccaaaaattattatgcmcacamaagtcataactgattgcaatgcctaggttctttccatctctgagttggtgtgcatggtacagtttgctgttttataaaataatggtgttatatacttcctggagtgggtgcatgaccagctgacagtgccctctctgctgcttttgcctattgttagcttgggtctgtatgctgattatttaaagagaaagaaatgcatgcctcatcctgaatacctcagcataaagttctctctctcagttttagtttttgttttgtctttatttttgaaaaatctctctccagttatgctgattgtaggaattaagataattccttaatgttctaatctgtattgtacatgaacttgctactaataactgagagccaagaagagggaggtggaggttcttggttttattctatagttgattgatgtggttaaaytgtataggaatgcttgaaatatttatttgctgatttcctaaagatatttcctgatgtcaccaaatacctattataagagatgtcattattagctagagattgttagtgttgtttaaccataccgtgtatttttttaatgcccaagttttgcctggatgtaacccatctgtgccatctttagcacgaaaaatctgaattcattttgatgccttcagactgaagagcaagtgaatgtgtgctgatattcatgaataaccgcgtgccaccaataatattttggaaattactgagccaattaaaaccgtcacaagtattcaatgtttgtacttatgcctaactctagaagtcagtgagccatatgtgcaattcagagacataatttgtccctggaagagatcaagactggtctggctgagcctatgctttgccaaaacacccagtcaattccacggaagccccgaccatctgagtgtttgcataacacagataaagcatgctaatgcttcactgggggtattccagctaaattggccagatgttttggcttctattcattcataatatgtgcttagaaatatgtttaatggcatcaaattgctgtgtcatattctgtgctatgtagatagcagatgttcagatagttacatcctcatgtattcattcattcaataaggattaattgagcatctattacaagccaactactgctagtaaaaaaaaaaaaaaaaaaaaaagaggagggatggggaaaaaaaatcactttagagacaaagtcagccagtggtttatattcttaatgaagatagaaattatatccgtttcacttaccacaatttagcccacaattagaacaatacctggcaaatcacagggcttgattaaagtttgttgaataagtgaattaaatgatagatatgggtagtgagggagaggaatcagtcaagtttgaattctagattttttgcttggaactgcgtsgatgatagaacttccaactaaaataagcagtactggaataggagattgtgtgaggaagactaggaattctctttgggacatgtggagcttgaagtgtctgggaaaaatccagggagagtgatcacacatttctgaaactcaggcataaaagaactgtgcaagggatgtgaatttggtattcatagtcacgagaattttggtgttagtagaagacatggcagtgaaagagatcactgttgagaatctgtaaaattaaggaacaagaagacacaagcagaccttgaggagcacaagttggaaggtgaaagattcgtattccttggcagagacagagaagaaacagtcaaagttgtcagaagagaactagggaatgtggtgtcacagaagcctagagtatggcattttaagaaggaaggggccatcagcaaagtcaaatggagacaagaggcccaggaagatgaagactgatagctgcctattggaactggattgaaggacatcattggcaagaggcagatctggtgagatggtagagtcagaagccaggtcatcataattggtaagaggtggctctgggtttccaagaactccagttccacccctgttcccttccctctacccatttcagtagtttgtaaatggcttggaggagcaatgaaaatcactaataattatctgtggccccttatgtgagtcttccagtttctgtctgcctgaccatactcccttggttttgatgctgtgtcttgtctgcccctgtatctgtatccatttgggttaaaattgttggtttgaccccattctggtatccaagttttgctcttggacatcctgaacacccatgcccttttatatccctggcccttgacaagtgcagatgttctgcctcttaatttgatgccttggtttcctgaaccctgactcagatcccagtgagactccccatgccttgagtttccaggtgaaatgaaagtaaggaaactagaaggcaagaagtttatgatcacaggtggactattggaacttaagatttaaaaagtagaaggagatgattgaagtagatcaaaagtgaaaaatttcacatatgggggagaatatccaggaagttcaaggctagattattaaatgagttatcaacatggacattgaatctctcagttgaaagacaacattgcaaatgaaaggaagataasaacaggatccttatcataaaggttatattttccttttctgctgcatgctctgagtaaaatctatatctgggcttgagctattgttcattctgttatttaacagatactcaagtgtactacatactgaggatccagtaatgaatgaatcctgtcctccaggagcttatgtttcttttcttttctccttttttttttttattgagatggaatttcactctgtcgcccaggctggagtgcaatggcacgatctcggctcactgcaacctccgcctcccgggttccagcgattcttcyaactcagcctcttargtagctgagattaccggcgcgtgccagcacccttggctaatttttgtatttttagtagagatgggatttcaccatgttggccaggctggtcacgaactcctgacctcaaatgatgcactcgcctcagactcccaaagttctgggattacaggcttgagccactgcacccagcccaggagcttacatttcaaaggagtgaggaatgcagacaattaatcaaaacatataagtgtaatgaaggaaatagagagatatgaccagggagtatatagcatacagaaggcattgtcagagaaagtctctctaaagatttaatatgagtgctaaaaggactctcatgcaaataagcaggaaaagagcattctaaacagaggaaaagcagtgcagacaccctgaggtagaaaggagtttagtgtgttagaacagcaaaaagtcccaagtggctagagcatagtgagcagggaaaaggagtaacagatggagctgaaggggctgggacctccgtcctgcaagctttgttgatgtattttattccagaagtgatagaaagggtaaaagcggggcagtgatgtgatctcaattagatttttaagggatcactttggctgcctgtgaagaatggactgtcgggacaagagtagacttagcagaaaaaagatccgtcttagacttcagattttcaagaagataccaaaggtttttatgtagctataaaaatgtattgtgtgtaggatattaatcattttaactggatttttatgacaagtgatatgccaagagaactgaggctactctttgagaagcaaggccccttttcagagcctggaatttgtttccgtatgttgtggaatcatcttcatcccatccatccctttcacatttattacagcctgagaatccaggcatgtttctgttactccgctaggccttttgaaagagtcatatggagaaaagtacacaactggtacctccactgtatgttttagtcatttctatgcaatagactgatttgaggcatttttgttatcttgaaattaatgtgtttaccatgaggattataaacacagatggaatttctatctccatgtaacaaatggagagcaaacacacttcattgcctggaatatagataaacatccacaaggtcaccaacactgacaggagtagagagcttygggacaggtagcatgtcgggagtggtgtgcccatgtttttccacctaattctcacaccaaccttacagggtaagtgtgatgtgcctacttcacaaatgggaaaattgggattcagagagaattgattaattccctgaaggacacatagctggtaaataacagagatggaattagagccccatatatctgactcaaaaagccccatgctttccatcagttcacactgcttccrtctttgtggcctgaagatatatgctgggtgtcatcttctaccttgttttcaggtcatctgtcagtctcagaaggtgagtgagtatttatgtgtgttgtgtgtgtagtgtgtgtgaatatgtgtgtggtgtggtgtggtgtgtgttatgtgtatttgtacatggtgtgtatatgtgtagtgtgcatgtatatgtgtgtacggtatgtatgtggtgtatgtgtgtggtgtttatatgtgtattatgtatgtttgctgtgtatgtggtgtgatatatgtatatatgtgtggtatggtgtgtgtgagatgtgtgtatatatggatgtatgtgtggtatgtatgtatatgttgcatgtgttgtatgtgtgtgatgtgtgtatgtgcatatgatgtgaggtgtgtgtatgtgagtggtgtgtatatgtgtgtgtgatgtgtataggtgtggggtgtgtataaacatgtgtaaagctctctactcctgtcagtgttggtgacctcgtggatgtttatctgtattccaggcaatgaagcatatttgctttccatgtgtggctgtgtgtgttgtgtacaagtatatgtctatgtgtggtaggaatgtggtgtgtgtgtggtgtatatatgtgtggtatgtgtatatatgtatgatatgtgtgcatggtgtgtatgtgtgtgatgtgtgtatacgtgtaggtatgtgtgatgtggtgtatgtgtgtagtgtgtatatgtgtgtggtgtgtatgtatatgtgtatgtatgtgtggtgtggtgtgtctgtgtgtagtgtgtatatatgtgtgtgtgctgtgtatatatatgtgtatgtatgtgtggtgtggtgtgtcgtgtgtagcgtgtatatatgtgtgtgtgtggtgtgtatgtatatgtgtatgtatgtgtggggtacgtatgtatatgtgtgtggtgtgtgtgagtatgtgtgtggtgtgtatgtatatgtgtatgtatgtgtgaggtgtgtatgtgtgtgtacatgtattcaccctctcatatatgtgggtcacttgctcaccacggctatttagaaattttaaatgaaaacatcaggaaatgaccagattctgctccagctaaattttggaaatcctacccaaccaagaaggatctcattgcctgagtgtcctcgcatgatgattgtttgcctggaacaaggcaacactaggcagcctctcacatgtgcctagtagtaaaaacaaacaaacaacaatttgatttagtcccacttgagttggcaaatgttgataccagaagaaaaggaaatgtgaagtcagtgggggctggctgggctggtgaacatggtcaaagaatatatttaggttactatatcttcaccaattccagctgggacttttcttagatcttgttctctgtatttattagaagaaaaggaagaattctcatctgattgccgtcctgattgaaacctccttgtggatccaatgctgagcctcaggctcctcagagtgaactggttaattctgtagactgtgagtcttgtgatctttgagtaaatctctgcaggaattgaaatttgcacatatgatagtggaagggcctgaatagaaactaagcagaactgagttggagtcagatttgtccagttgctactaagagaccttgggcaaccacttctcccctccaaggctcggtgtcctcatttgaacaatagcaaaactggactggatgatcsaacaattcctttcagctctgacattgccctattcagtttccctacctcagacacaggctccaagactgtggccatactggtgagccacatacacttcagaattctaccatccataaataatttaccaggaagccatggggacatccactgtttacagttatcttactgtagggtaacagctacacttatcctggtgaaccgtcttaaaacatgaataccaaattcagcaacaggagttaaagaaaaaaaaattaaaaagtatttgaggtaaaatcttacctaactagggaatgagatttacccttttctctaagcataacttatgattttrtgtagataaacacccaaacatcattacagacatcatcacactttgcctgctttcaaggtcctgttttcaccatggtcattatgttctcttattgagtgatattgttscctgggatttgatttctttccttcttctttctgcccctaaagggtggattcaaactaaggggcaagcctctttttygtgaatatgaaggcgtgcaaaaaaatgcattytttaaattcaaactcatcttacttttatcattcagcttaagaaaggcaatcctatcaagatgcttatttgttcattcattcattcagccatgcatttatcaacagcttactgagaaactacaatttgccagtaaagttctaggatctggggatagagacgaaggtggggcaagcactccggagcttagtttgatggtgctactaagaggtcagcaggctcactgtgaacattgttacaattatggcaggacagagtagtagagtagtagatgagggaaaattgatctgagttaatcaggaaataccttaagctgagatctacaggcaagcaggaattaagccaagaatgagggaacaagaccttagaacgggagaaaaagcaagtccaccatctcagcctgagtttctttgctcaagaccaaagcacagatttctctttccctacagggaattctgacctgaaattcctccccctaaaaacacctgaaatattgaatcttgatctttagaaaggtgtgttttcagaggtaactgcttctgtgataagttacaggacatctaattgtccatattcaatataaatatgcagagaatcacaggcatatttttccccacaggtaatttttttaaccattttaacatcagattaagttttgatgcttattagataagacatctgcagacttagggtcaagaacatggaaatctttggaaattttcctgaagtcaagctgcattcttccagtaacatggctttttctgacaataaaactccccaggctgtcctgagctctgaatctgaggatagctgctgagttcagccagggagaatcattagtggggtctgctttttcactctgtttcaaaagacaagtggatttgaagscttccagagaacattgaatggattaagtaggcaattggatccatttgctttgactcatcatccttcctttctctgaagttcctggggtagactaaggaagaagagataaaggtagagataggactgaggcttatgtagaaccacagacatgaaaaatacacatttaggttgtcaagcatacatcatgcagccacggttactcccattgctgataacctgctaaaacttttctacacaaacgaattggactcttcttttatgagatattgagtcattgtttggggagtcataaaactgagggctgacaaacaagacccaataaatgtatagcactttaaatatgtcaaggtggaaatgtatgatattttaaatatgagaagataggtaggaagagtaaaagcaaaaatctggattcttttcccctgacttatttcctcaatttgaaaacaaagaagtgggatttattttctatcattcttggtgttcactttgccaaggactgggctcagatccttcagtgtaaaatctcttcattgagctacaccaggattgctctcatctctttgccaccaagtataacttttattgtttgacacagcgcagttcatatcgaggaaggtttttctttccaagcaaaattgcatttgatgtgagtgaatttttattcccatttttcaagtaattttatatgtgccctgacccaccagttttcctgctctacacaaacacaagggtcttcccattctaaggtgactgaattctagccagagaaaagataacggatatttttgttggcctgaacagccacggtacttatatatgtacttctttttacttccccttgtgtcaaaagagacttacagtggcttatcttcagtaagcatacagtatggatggaagtttttgcaaggtcctcttctatctcaaggattcccaaactactgttgtgaatttcaggttatgcaccactagatttggcagtgtctcttcccactgtgtgacttttatgttacctttagtcccctaaagaatcatgtcacactgtgagatagtaaggactttggatacattgtatgaagtatcacccactctggacttcatgtctggggaaaacttaaacacaggaccactsataagkgataagcctggaaataaacacrcgggataataaaaaaccagaaaagctaaaccaattacaccattcttatagaaatgtgtgtgttgggaaagttagggtaaaaggaagtagcaggcacaaccccaaagaggtagcaatgtagctctaacatagaccgtttcttcttttcccagttttgccctgacacaactggtgaaaagtaagagatgctggattcttgaaggtcagtaatttgttgctccattggaattaaattaaggaaagcatcaataactacatgtgattagtaaattgtataagagtggtctgaaaaaactcatactgagaaatttaaaacaccaaacatgagcaatttatcagcaacccaagatgtgtaagtttttcatctgcctaaattaaaagttacttctgaaccttcaaagctaaacatttaaataattctatttcaattttctcaaaatttctattaagaaaacacaacsacaaccacacacacaaacatgcacacccgcaaacacacacataaacatgcacaccccaaaacacacaaacatgcacacccacaaacacacacacgcataaacatgcacacacacaaacatgcacacccacaaacacacacacataaacatgcacacacacataaacttgcacacccacaaacacacacataaacatgcacacacacacatataaacatgcacacacacacacacacacacacacacacaccttcttctccccatggtattgacacctctaaaaaatccacatctttgatgttcacaagaaaatggagtaacttaggtctggatatatgtttgtttattcatttcctgagctaaaattctccaggttgccaacccaaggtcattcagtcaatgggatagtggtcatctcaccaactacagccaatgacatttcaacccagctaattcagtgctargagatatttcaattcacacctaccctgtggccctatgaacaaaccaccaatgtttcagtttctctctcccctacttgtgagtcccatgtgaatcctggcagaaatcttgcctccattcctagatcgtaccttatcccagcacttacaccatccctaatctcgagatgaagtccgtgctggagtttgcatatctgttccacacattactacggatgtgatacttaaaaagctaaaaattcaattcaattgacaatttgcctcaaatcatgtggcgtcaaagtggtcggatctaaatgagtgtgccaagttctgtttccgccaattctgcagaagtttaacaacattttttgattttataaaaatgacccaagtgtgtaatgtctcagacataatcacatttcccaaactgagatgagaatcttctttttaaggagctcaaagaataatatcagaggcaagcatctaggattagctaatagattggtggaatagagtcaggyaagcttctcaggcaggagggaatcattgtcagaccccacttgacccaagttaacctggctggattccttaggccagctctaagggacaaaatctagaatgttggtaattccctctgtgaggtctcagtcttcttatcctgagaactctgcccaatcacggggaattgtggttgaacctggagagaagccacagcggaccacttgcccacatcacayctcaagagaaccaggagagtacatctgtgtctaaagccatgacccaggagtaggttgaactgaagcaagaggtgaggcatttaatgccaggcaaagcacaccaggaagacagcccaggattgtgcttggatatcctgggacctaaacccccaaatgattaaactgttttcatgctccagtttaccaatattagttgaaaggccaagagtgaggttgtggggttccaatgagtagcaaatgagtaagtgcctagtgtggtatcagccagagtcrgggcacctgccttgtcattgttttattttcttcatcatagactgaaatttcaggacaccraggaacaaaagtcaatcaaaggatgtcacagatcccttcatccctatcaaagttagcatccagacaatagtcggaaacttccaattctgcctaaagatgggaagcaacgatttcccaaatgacctgakccccagactgacattgtttactcataactgggaaaccagacaacagaggggtgctgaaatcctacagtaggcttatagaaatgtctaggctattattgcaacagaatggacattctgacccctgttatatcgtttcctggggcagaagctatgagactattatgaaaattatttaaaccgctttccatagcagaatcccacagaccttctcccacaataagatctcgttaaacattcatttgcttttcttggaaaacagattacagtgacataaatattcaaaaaataaaaggaaaagtaagcatgatttctaactaaaaaagcatcaaacagatcatttggctgtactgtttcattttctcttagtatagacaagaaaagttgcaacaatcttaactaagataccttgcttatgggaaatgttcctattcactagcacctccactcccataagaaggaaaacttgttataagacagggtcttggagatctcatgtggatattttatcaagggctccccaagtcaatgtttactcaaataccacttagcattttcttactaggaaaatatttcatctcatatctccccattcccagatttgagggaaaaaaattgtgccattttcaaacataacaagcattctcctccctgaggtcctcaatgcaaaccattgtagactagatcaccttgaagctttcccaaggtatgagctttcttaagaagaataaatgataagtatttaagatgatgggtatattaactagattaatctaatcattgtacaacatattcgtatatcatatcacaatgtaccacataattgtatattattataatctgtcaaaaaaagaacacaaaatgactctttttaaagtagaagccttctcttccaggggttgggttggcattttaacaaacagtagagaaagaatcgctgtaatgtgcactgttgaggtactcttacttaggctcactgtttttcctgtgtcttgtaggacataggaagttcataagaactgaaaggtggaacctctgccttttccacaacccaaaggctgcaggcatcargtttaaaatagaggtacagaggcttccaagttaggcacagaaacatgctgccacaggggtaatggaagcgtgctcccagaataggttggggaaactactggccctacctacttctgaatgaagattccagcctgaaactgaaaataagcagagtctttgggaaaggttaggacatctcagcatgaaagacagaagctgyacagctgtgccttgagattgctgagcctggcgttctcgctaggtcttttccatatcagcaatgagttggcccacactgtgagacctcagtcacaactactatagctaaatcyaaagactaccacatctgccttgtccaggagctaataaagaataaagtgctttcactagtgaccttaacctccttccacaactggctcatggagaacacacaaactgaagttagcccaggtgctggtcccagaaaaggctcaaggttaccccttgccagcctgtggtctctggtgctctagcagccagcactgggaagtagtaatgggagtgacattctctgggtcccaaaagtctgaataaaacctcacattgacaagcgtcactaggctgcctttaaaggcccttgctcttggctggaatattaactgcattggtagtgccttttatctcatgctgagaaaaactaggcatttgatcaaatagcaggaaaataaactacttcttatttaatacagtttggtaaacagaatctttccaaaatttgaagtccatttgggagagaacagaaaaaaactaaagggacttttgcagtgaaagaccagaaacactgccctagggacaatcttcttatttttttatttttagttttatgttttattatactttaagttttagggtacatgtgcacaacgtgcaggttagttacatatgtatacatgtgccatgttggtgtgctgcacccattaactcgtcatttacattaggtatatctccaaatgctatccctccccmctccccygaccccacaacaggccccggtgtgtgatgttccccaccctgtgtccatgtgttcgacaatcttcttataaaggcacttgacctttcrtctatccactcatccattccttcctttcatatacacttattatgaacctagcagatataccaggtgccggagactcagttatagataaaacacagtgcctggcctcaaggagatcatagtctagagaaacaatcacctaattaggcaattacaatgaatcatagtaatggtgataaggacaattgcagcctcagagtaggcttactggaggaggtgatgtcttatttgttttttatagtagcagtaggatacatgcctagatgctacatgtttcaatgcataaaatgagtaattacttaataggtcagattatgttaggtgtccatgttccaccacaaggtcagatgccacgtgcactgggtctgatactctgtgaagtagtrcccacaaggcaaggacaaactaagaagaattatgcaatatgtagaaactatatcacctatggaacaactggggaaatacatttcatgtgcctggtgaagaaagctaaggacactggaaagcagccacatgaagggagatggatgtagatcttgttcagaaatcggaaacaggtctagtgtgtggaaattctgaataaaagcagggaagaactttaaagcactgtttcccaaatagcattccatgaaacatatagaggcaattcaagaaaagggggatttgtggtcaaaaaagtttggaagatgcagagtttaaaagtcttatttctgtggaacttatcagtgcctttatctcaataaagtgtattgagataggaagatataagaaatttttcattcagtaaacacatttattgtggttacaaagtacttaagtgactacaaagtatcaggcattgtcataggccctggggacaaagacatgaacaaaagagacaaaattaaggtaaggagaaatggcagtaaacaaataatggatctacattttctaaactgattggtccacagaaccactttgtaatgaaacatctcatcattcttgtgcttcttgaaacacatttttgagaaagagtgaattaggaggatctaacaacgaaatagatcactccagtgctgtaactatgtaagctgatttgcagtgtctgtaaggatgctttaaagggtcttttgagatttgagcgtatgatccctaagacctgaaatggttttgactcaacaaaactggatgtttctagacagtacaccttcagcctgcagtcttgctgggaagaattatttgctgtgacaaactgattaatgaataccaarttttatgacaatccatgaagtgataggatctgcaagaaaagtaggattttactgggaacacagataaaagacaagtcctaaagaagagtcttctgatcataaaccaaatgatgagcttaagaggatttgtgacttcccccagcccattcaaatgcaatttacaaagggctacctgaccctctcattataattttcaccagaacccccaaactgtcaagcaagatcctatcatcagagactcagttcagaaggaactctggttctcatttgcactttgatctatctcaagcacctgtgagggaggaaacatttatggaaatacctgaggagagcacgaatctccattaggataaatctagggaattcaacatcattttgggaaaaaactcagtcatgagaggccatctcagctgcaaactctgccatttctgctgctccaactgacttcccaaatacctaaaacaccagctaaagtaaatgaatagcattatttatttataacatcatttataacattattacattgctgcttcaatctgacatcccaaatatcaaaaacaccagctaagtatacacatatacatatattatatataaatacaatgtatacttcaatcatacattgaagcatacgttcaaatatatgtattctawtatatatatattatattatagtcaagtattatggcattttccattttattccattttgtccatttgtttttcctattctttagccaattgtttagagtgtttatgtgaaagaaccgtctcaacattttggaggtccatttaatactggaatcacatttggaagcttatgctatttttaaacatgatctcagtctagctcgcactggtgctgtaagtcttaaaaagagaaagccctattctattaaaaatagctcattccagtatgactctaatgactctaaatagacaaataagacaagttatacctgtctccactactgattacaaatgaatcactgtgaatatagtgaatatatcagtgtatggattttttatgttggtaacattatcccactgaaggtgacatcttagtggtcattactaatgactaatgagatagaggggtatcacagataatcccaaatcatagtcacccccaaagacatgtagcctttgcagtgtactgagggttaaatgaaagcagatgatttcctgatgtccctctctagtttcaatttgcttgccttcttgagttaatgatggtcttcccttaagcacatatactcctaaggagtaaggtaggtgctagagaggttgctggccaaacagcatttgtaattgtcatatgtaattgacagaggaaataatcagaaaaaacatcactgaaaattgactacctgcataaaatgctaggaaaacacttgcaaagaataaaaataactacatgggcaagaaaagaattctccaccacattattgacattttgatgaaaggagctccttcccaactattacctataacttggtggtggtgatgaaagaaagaagaatgcctctaaatttctctctcatttgaagcaaccacatagacagccaatagaatgtggagaggagcaggggagtttcgaaaggaggagatttcattggtctgtatcctacagaagtggccaatggcagcagaatccttctctgaatggacggctgaatacagcacaggcaaccaggaagcaatgtctattcctaatttccaaatgtcctctacataccagtatcaattcctgctaacattttcaccagttcacattaatatgagaaaaataaggacaaagtagatagttatttattaaattaaatgtattcaatgtaaaggactgtcttttattctgagactacatcattcctgttaaggaaaaaaaaaaacgccctttcttctattacataatggtcatattaaagarctgtggttgctactgctgctgctgctactgaaatttaaagaaatcaatccccaaactattttttgaaacttctctcctctgtgaaatccaaaagtcttagagtcactgaaggcacaagggactggtagagtggataagctcaatttagttaatagaaggaaaaccatatacaaataaaaatatcagacagtgagagatgcctaactatgaatgtgctcagatgttgtagcagatttcctctccagctgttagaccccagctccaagcacttacgagggcaccctggcatcccaaggtcagaatgtatggtcagacgaggacagctggactgtcatttccatctcttctccaagayggaaaatggagttttatcactttccatgccatatgaaaaaaayttctgaccaaaaaaccaatgagaaatccaccaagtggctgacagttcagcttcctttgctctctgggatgctgcactaatagcatttaattccagggactaaactctctggccccgcatgtatcctgcttttcaattctccagaacattggttctggcctccttgtctctgctccagcccttctcctaacatgccaccccctaacatctatttttttctctatagtagtctctttggtactcagagctgaaattacatgcttcagtgccctaagagcatgtactttgctttctcatgttggcacaggcagctctattctttattctagggctggagaagagggtttcagtaaagtctagccgtgatgagccctgctatagaatgctttagaagctttgaatttatgttacattgattaccttcatgaaggttaaaatgaagggttcaataacaccatagggagaatccttatggggtgggctggatggcttcacagaggtcaaagctcctgactccagctgtggtcctggagtcagcagatctggcttggcrgcaaatgagcaagtctctctgaggctcatcgatatctgaaggtttggcaagaggatctgcaaggtcctatgtcacctctcacaggctgccatttgatgactccataatcttatcttcatctagcctgtgttctaaacatagccaagctgagaggctggcagagaaaagcaaatgcagtgagtgtgtataaaggcagagaattttcacttccttactcactctacagatgcgtggcatcctctactttccttcaagaagatctattggaaggatgggttgggcttccttgtccctatatatcccttcaggtccaactcacacttttttttttgttttttggtctaagaagctgccttaaattggtgctgtgagtgaacactgcatttggctagatacagccagttaatcttatcctggctactgaatcaccaggaggaaaggtctccttgccaaacctggtgtgtcttcgtaagccaatgcagtttctgcatccatgtatccatatccagtgaccaaccrtggtggttatgcctttccccgtctcgtgctgtgtaaccctgtgaaatggtgggaggctgcaagttgcttgcattttttacctaaaagraattacacacatatatctatatgaatatatagatatataatggcctatgctgagggagggacatattagcgaagtaaaaaatttagcaatctttatcaagtttaaggagcagatcctggcatatttggctgtctttctatgagtaatgctaaaaaaamaaaatgcaagccataagaccccaagtctctccaccaccattaaatgaaaggtcacacgaaaatgtggaatctactcagttggagatgatcatttttggggacttttaacatatatttactttctgttatttttttggttctctttctctcatacccaggttgtgcctggttagagaaagggtcttgattaacatttctaagccaacaactctccaaatacctcaaccaaaggaattcagtgtgcctacatagagaaaaaggaagtgtccctctggatgtgatattttgccaggttgtatttctctgcaccaaatgctatcagatcaacttctgtaggtttcactgaatacaactgcatggaatgctattactgtttgcaatgcaacatgatytaaaaacattgcatttctgttttatctaaaggggactagcaggtttattgtgtttgcatgtgctttccccctagactctggctgccctaacaagaaattcaataaatctgcttccaaaccatcttgcacaagctttgcatgtccagtctgggcctgaggaaattaacaagagaatagaacataccatcgacttgcggagtggcgataaattgagaagagagcatatcaagccattctcactgatgtttaaagactccagcctggagcacaaggtagagctgggtctccacagcggctctttttctgagtaaattgtggtagatgttcatgggactagagagagagcccaggggctgtggttttggtttctttgtttgtttgctttggtttggtttggtactgtctttcatttttctccttgaaaatcatgagtagactgaaggtcatgaaaggagatgagagttagattaagagaacatcagcttgctctttaaggaaaagaagactcaaagaacaaagactcctttaactcagtaagcatcaagagtttcttccactttcagattattaagccaagtggcattaacagccacttamctttgcttttagatgaattcacatcagctgcaaccattttaacataataaatgagggcacccaataacttgatgtaagcggtcagtgataaacactgtctttcttagattttagatatctattctcccctttccccagttgtctgctgcctcagagtcttctgacctaggcatagtagaaagaagatgggttgtggattcagagtcaaatttgaattccacctctgccactttcttgctatgtgaacttagataagtaaagtaacctctctgagcgtgagttcccctctgtrtgatgaggataatgaatgcacctacctcacagttaatatgaaagtcttcagggcaacaccttgattaggtaaagtgttcaaggatggcagctatcaccacattaatgatgactttttccattcccctcccccacctcagctttgaactggagaagggagtgggcagatggggtgccgaccttgcttaactgggttgctcctttgtgctgatagaagctgacagaccttccttgactgagcataagaggtgcctggcatctgcaggagcctcgggcaggaacagcagggaatctacaagcaaatttcaggagtttgattcaatactctgtaaagctccagtgagcaatttttttgtaagtttgttcagctgcctgggagatttgctttccttagtttagagaattcacaattctgtgcacatacagcattcccaatgagcttctttgatagctacctaaggattgcagactccaaaattaataccttcacctacagttcccaatttgagatggattgtgtctatgtactaacaaaacaaaaggaaaagaaacattttgcctcactcaacccacacaaaaaaagtaaaagacacacttctcttattcatcatataattaagggcttaaggtccaaattaaatacattttctttcccggttactgcattgaagaagctaggatgaagagcagattgctttacaaagaaacttctcaattagcttgtgtaaatacctgtgtccagagctatacaaaacgcttttatttatttttgctaaagatgtacttgcttcactaataacctaacccgtgcatactacagatagtttctagtgtgttttatttaatagcattcacatctaagggaggaacagcatgcctgaggttgatttctgtgaccagggaagattmttctagaagagccagagtacagcaccctgaacaaacatgggacttgcccattgacagtctagccacagaccacctagcctgtgctatgcattgcatgggttccccagtggtgatggcaacaggacacatcagcaaacgatcactcctctcctgtcaccgagatattcttcactgactcttaccgagatactcttcattgactcttgctctgagaccatctctagggactgtgttactgctgagcagagaatatatcacaagtaacattcattgggtatttaccaagtaccaggcactatttctaagctgtctgcataaatcaactgacaaaaacagtaataaaaagtagatgttattatgagcttcattttatacttggtgaaasgtgacatggagaaactaytatgaagcttttccaaagtcaaactgtcagagagggactggaatctgagcctaccatgatgccatagccactgctcttgtctgttgactatgctgcctctgccaggagtccccaggacttgatttcccagggtttcgtacgaagaagacaatcccgtgctgtcttcattttccttttgtcaaactttggatgcagtgggaggcacagagagggagtttacaggagaggctaagtaggaaagggttctagagccataacaaaattaaaacaaggctttcaaatacataggattccagaatcagaaaatagcattaatatgcagttcctctgtgcttgctgttagatacatcagtttactattccacttacaaaagagaaaactgaacctccaagaggttaagtggagatcttagatctcaaaatccagctactatatttcattgactctaaggtgtcatcaactgtgagatgctgtattttctatgcagctctcaraaaggraaaaaaaaaaaaaaaaacctcaatatgggtttctaagaggaaacacacacacatacacacacacactaataaactgggcttacaccctccgggtaaggatatggggggctgaggggctagtgggacaacccccttagacaagggtagtgaggaaacccatatgcctataccctggtattgatttaataaagggaagaagctccccaagaatttaaactccgaaatggaatctgcataggtttgctgcatgaattcacactttgaatgtggacaaaaaaaaaaaaaaattatcagagaatttaatttaaaatgatcctgggttgatattgccacctggtgaccacagaagcaattgcaaacctccctggaaagaactcaagattttaggattcccctgataataaggtgcatgctgatttcagagatgtyaaggtgtacattttaaggaaaattgaayatttttattaagaatatatgtcttagaattttttaaatacatacaatatttatgattctaaagccttttctcttsccactgccctacctttcttcttgggaacaagtctggaccataaaagtatgttttctgaaaggaaaaatggaaatggaaaaataattgttcctttgcaatctttgtaggaaaggaaaggctttattccgtttgaacaataagaagacaaatgaatataggaacccgtttgcctttccacctttatgaaaacactgaaatgttcaaacaccgaaatgaacaaagctccatcgaaatgtacagaaatatcattcasacattccctggtcacgtttgcctataataattggygtgcctatccacaacattatgtgaaacaggacttttatataattcatggtattgcataaatacttgttgaatgaataaggaaatgaataaagactcagtttaagaaggttagataagactgcctcaccccctgtagctgttttcaggatattttttgtgaactctaagagccgaaaggcatgggtcaattttgatctgactctttttagtggagtttcagcagagaacaaaagttctgtgtactccctgccatggaatttcaaaggtggctcactccctgctccctcacaggagtcttttgagttaagcttcagaacagtatgctcatgactcatgtagcttagcgaacatatctttccttctctagtccttggattctttatctgtgaaatgaggacgttggacagctgctgaccacttcagcagttaatgctataaatctgtgaatttcctatgatcatggtggccatatgtcctggtttgcccaggagagtagtagatgtctatttttacaatgtgaaattagtatcacctcccttcactctaaaaaatcacccagtgtggatgatatgtaacaagtcatgtgacccaaggcttgggcctcagccaggttagaattagtgactcaacatcttccttcactacccagccartcatcaggactttctaagcagaactctggataggggagaggagacctattgcagttgccaaaggccttcttcagctcttcccacatttcccagatgaatcatttgcccttctttagtcaggctagatatttcctaagtgggcttacagatctcatgggcaagcacaaatcagaactatggtaaagakatgtagaaaacttaatgtgtctgtcagatgctaccaatcacattggtatttccttattgaatatttcttattggatattttcttattaaaagaagaatgcattttcaccagtaaaagttgatactaagtataaggcaaaaagaaaaaaatgaaatctctttggatctttcaacccagggtaaccactgttaccattctggcatctgtcattctggtcttacatgagtgtgaatctatagacttatgtacacaacygtattagtccattttcatgctgctgaaaaagacatacctaagatggggcaatttacaaaagaaagaggtttattggacttacagttacacatggctggggaggcctcacaatcatggcagaaggtgaaggaggagcaagtcacatcttatgtggctggcagcaggcaaagagagagcttgtgcagggaaactcccattttaaaaaccattagatctcacgagacccattcactatcacgagaatcgcataggaaagacccacccccatgattcagtcatcgccccactgggtccctcccacaacatgtgggaattatgggagctacaagatgagatttgggtggggacagagagccaaaccatatcaaaaatttttataaaaatagaccattgtatgcacagggcttcgtaacayagtgttaaacattctttgcttgagcttttttccycattattaaatattcacttacacagtaattttagtatttacatactatctcattgcacatttaactatttcaggcttttaaaaaaagtttttcactattataaattacaaattatgttgtaatgactattctcatagttaaattatgcacttttgcttatttatttttaggataaaatcctaggggtgggtgaaagagaattcacatttaaaaatacttaatagtcattttgaagttgccctcaaaaattgtgcttacacttttaaaaacttgtcaatttggtaagaagtaaaaagcagcacctgcctggcatttctgtttttatttttaaaattattattgcagtagaaggtttgtcagtacatattttggcctttataattctccttttgtgacttgcacatttcttataccttgatggtatgatttacacatttgtcttcattgccaatcttttatcgcagtgctcacctttgtcttttttatttgtgagccttctttacacactgaggaacttaaccttttgtgggatcacttatcttgggcccttccattttcagagcacttacaagaaggtgatgtttctcagcctctggtcctcacttctcttctgggaaatggctctgaatgaggcttaggatagggaagacaattaattacatttacttatggatgtttccaagccagagtagccaacccaaaactttagcatcttaagagagcttaataacacaggaacacttatttggaattatttcattaagctaagtgttccaaaaacaatattatcaccttataataaggtgacttcctcatcttgaataaagattaagacatgtttaatatatacttcaaaattgattgcatatttatgctttggatatgggcatttttgtgggtaaactgtgataatcaagccatatcaaggaagattaaagttccttccttcttttaatgctgatatttttcctcttgattcttaattgctttgagaaaaggcatcctttgtccttgtgacaaatttatgtactaaaactctctttgtctcaggctaatagttttcaaacttaagaatcatctggggatcttgtttgaaatgcaggtaccatcccatcactctgcccccaagattctgattttgcaagaagacctgcattttggtaaatactcttttttggattttgttattcttggttgttggccatctttctctgtccttgattgagcatgagactcgggctggtcacttgccccacatcttcagagatcagcttacatcaaaaagtccccgggtcctaactcaagggtaatatggcttttaacaagtctagaggagatgtctccaagagactaataatggcttcaggaccacagtctttgggatcagctagacctcagttcaagtcccactttggaaatagaagtgagcataaaggacagttgattagtttactgatcaataatgggtaatgacaagttgatatctttctgtcactcaaatggatacacacacacacgtataaaatcctcatttcgctcaccagtatttagtcttcgttgaaagacagaggaaagaacatagactggattctgacttgaacccagttccaaccagttaccggttgggtgatacaaagcaaggggcttgatctcatcgaaatgagtatgattgtctgcccctaggggttgttgtgaaaattaaatggcacaatattcatataacagaagtttgtataaatgcaatagtctttcttttcccttgtccttctaattaatcctcttctaacccaaacctgcacaaggcaagaccctctttaagataaatctcatatgggccaatcttaatgygtcttgtatcccagggtaccagggttccaaccgtcattaatctaagcaagtacagccttgtagctcattggaagaggtgcttccaacaatctcccaggatcactggagcacaagcagtgaccaccttggcctctgagatgtgtttaaatttgtaggtgtcatttgcttgtattttctctaaatgatttgattattctaagatccttattatcactattttccaaaaaaagataaggattgtttctctcttcaaggatgatagatgttttatcattcccaaaggccatgcttttcttcctgtgaggacaagccagccaaggattagatatttcacgcatgggtttctttatgctcctgcaaaagattgtctttctgtccacacttcttgtgattccttgggagtccatcaggcatggctcagagtgttcactctagtgattcttgggaagtgcctccagcagagctcagagcattcatgctattgattcttgggaagtccatyaggaacagctcagagcattcagtatgcttggtttggattctgtttgtgtccactccattgggcatcttatactgagatgatataggaagacataaagccacagcttctgtgccctgggaacttacactctggcttgtgatctgggaacttcccatcctaaaattgggcatgataatggccactttgcaaggtggtgcagatgaaatgcagataatacttaagtgccttggaggctgcaatgaattgcaactgaggcagcaatgtgacaaggaaactggtatttgctgatcacttactaccatatcaggccctatcatgactattttaaatgttttacctcattttacttaagtgtcacaacttcctttatggaggtactaattgtactatttgacaggtaagggagtctcaaagagtttgagcagcttttccaaggcccacagtaatagaaggcagcagagtggggattcaagtagagttcactgtgtctcccaagctattctaccacttctgccacaccttgaaaaatcctgtctttctcctaagcacctgattttcatatagtttgaaattcaagaaggatgcagccagtgggttgcaagggaggagttatacagtaatgcatatggcaaatataccatagagaccaaaaaaaagttaaaaccatgaacatttcttttatcctctattcattcccccctgcccccctacacacacacaaatatccacacatgtcacacatgtacacatacataggcacacacatatacaaacaatccacctcttgtttctggcaacagacacaatcttgataaaggtagcctgaaaacaaaggcaactctatcaccctaactatgcatgaacacgtaagaatcaaataagtgaatacatgaacacatgaaacattttttcttaggccagtgggagaaggaatgatgagtcctcgaaccaccgttgaactgtgtatcccaaaaaaggctgattagcttgagcaatcaaggaggtagttttgtgacaagatggctcaagagaagacaaagccagaaatagcctcccagaacaatcaaacccggccgggagtggtcacttatgcctgtaatcctagcattttggragaatgaggcgggtggatcacttgaggtcaggagttcaagaccagcctggccaacatggcaaaaccctgcccctactaaaaatacaaatattakccaggtgtggtggcacacacctgtaatcccagctactcgggaggctgaggcacaagaatcgcttgaacctgggaggcagaggttgcagtgaactgagatcgcaccactgcactccagcctgggtgacagagcaagactccatctcaaaaaaaaaaagatcaaattcatattaaacaaaactgaagttgaatgagcttygtttgctacacacaactaagcttttgccagttttatattatgataactattgtaaatagtgcttactatgaaccaagttctgtgctgagtattttcaaaaacattcatttaatgttatttcttttttcggttagcagccacataaaaccaaggatttgccacacaagagaatctttagataattatttggctcagtacaattggttcttmgctatgtccagaatgtctctcagtttttttctgtcatttataaagaaaatcaaagttaaatggaggctttaaaaacttcaagaaaaatgaatcataaactctaaaatgtttcttacttcatcccatcaacttttattggagttgtaatgattagtataaaataataaaggagaaatctgggcaaagaaaagaaggctaagcaaatgaatgaattttctgatgggttatgatgttggactctggaattaggtaacgagcaaaatgcacatttttgtcttggggacattcagaatttgttgaaccactccatgtcttatttagatgaacagaaatgggaacatgaagcatgaaccaaatggtctcagcttttctctttcatttttctaaatcacatatctcctagtcattttcatgatcttattgttaaaatgatttttaaagatttattctgttatagyatcaggctgctcttgagtttttactgctctagtaagtcccaacatagtatgaatatcttggcctcctccttcagatgtgaaggacaggtttcaaagaggcttcgggaagaaatccatcccttaatgagacagtagmcttataagactcctttattgtcttgatattatcttgcaaaattacagctgtttctaccaccctctaggtagtcaaatgatatcaagtaccatttcgtgtgtattttttaatcagatcaattagccagttccagtcccataaagccagcattttcagagtcagaagtgccaatttcacctataayagtgtaatatagaattacagaattatgaggccattgacctggtcactgaagcaattgtaacgcttcatgggtagacatcattatcatctacaaccagggacttctaggtaaagaatatagcaatagttaccactctcttggcttctccatggctgggggtgtgggtggggggctggaccagtgaagaaaggaagagttcttcctcccaaggatgaaagatgttggggagggtgagctggaagaatggtggtatggaaggtttttaaaagtttttcttgaaattctcatgtgcccagtctaaccccgctatcaaggaaggacataacattaggaaatgtattaccaacctagggtcttctgtcacccctgggcaggtgtcctcccagccttgcacttctsaagcccatcaatcttaaacgcatgttagcatgtttccttgtgagtcaacttaacatgattaaatccacatttgttcagaggtcagtttgcttgggaagaagtatgtcagtgagacattctgcacactcacctgtcactcatagaattaattgctcttaataataattttattggtgtaggaaccaagatagagaagatggcctattttgaaattcaaaaattactgaaaattagtctcattgcaattatgccttgtatccaaatggtgtattttatttatttatttatttatttatttatttatttatttatttattttttaagtcagagtctcgctttgtcttccaggctgaagtgcagtggtgccatctcggctcactgcaacctccacctcctgggttcaagtgattctcctgcctcagcctcctgagtagctgggactacaggtgcacaccaccacacccagctaatttttgtatttttagcagagacaggatttcaccatgttggccaggatggtctcgaactcctgaccccagatgatccacccacctcggcctcccaaagcactgggattacaggcatgagccaccgctcccagcccaaatggtctattttaaggatgctctatgctactgccatgctacagaatgcatgaatttaacaacagaacagtggttaaatttcttcatccactaatgcaaaatgaacaggttatcccagttgagaattttcttttacaactatattaatatatactaataaaagatgtgctagaaaattttctttaatcaaactaaatttatccaaaaatgaaatgggctcccaattgaggacttgatttcccccaacactggaaatattcaagcaggagttaacagcttatacctgagagatattagtgagttaaactggcattagtaaagattggagcaagatgacaaatacaattcattccacctagaagattctgtaatctcacctacaatctttgataaaaagacagagtggccaggcgtagtggctcatgcctgtaagcccagcactttggaaggctgaggcgagcagatcacctgaggttgggagttcaagaccagcctgaccaacatggagaaaccccgtctctactaaaaatacaaaaaattagctgggtgtggtggcgcatgcctgtaatcccagctgcataagaggctgaggcaggagaatcacttgaacctgcaaggtggaggttgcgctgagccgagatcacaccattgcattgcagcctgggcaagaagagtgaaactcgtgtctcaaaaaaaaaaaagacagagtacagttacagtttaggcaattaactagataattgttttagttataagcatcttctacatcttgtagaaatgtaagaatctttcagtgccttttascttacagtcaaaatggagagtctaggaaagcactgtggttttcctccccctcacctaggaagagttcttaggactatcccaggcatggaaacatggaaggctggaagctctgtccatcacctctgtaaacgaacttccctgatcatctctctgtggataagaaatctgaaatagatttgttttgcatgtgatcagactggggtttctcagcttctttgtggtggatctaaaaacccattgaccctcatgactatgatttcatttctgaatatgtctttcaagataattcagggccagaatccccagacatgaacaaaatgaaacacaagtttatcctgctccacttccttggaaggaatgggtctgaacttcatcaaatcaaacaggaattttcatttttgaaatgatttgtttatcatttgaagattgtggtcactctccttctgttgcatttaaataaaatctactgtcttttgttttcttccctattatcagttcacccatcctggcctaaaaaggggctcattattttgcattgcattgtgatgaggatccattcatcaatcaggaaaatatagcrgtggcattttattaaactaatttttaggctgtttctaatgtccattstttgcccatatgctttactttcattctaaccaagatttacataggcttaaatttttaacacattccctttctgtatatcwtaaattgcatcactgaaatatacccaagaaatctgatcatgcacctatgaacaagatagccttactctgaaaatagcaaggaagcagtagccagtgagtccctgcattctagwgcaaaactcactggattctctatttgcaayctgtgaaggtgtggttgagttactcagttattcaaaccctcagtttctttatctacaaagtgaggatattataaacaagaccttcttcaagagttgcaatagttaaatgagaacattcatgtaaagcgtgtatcacagcaccagycttgcactagatattagtccttattattcaaattccttatcctagattttgacctttttttgaatcaactaagaccctaaagattgagaaataataatattccaaatcctaatctaagatctccgaagaagtatttgtaatttgttccaagtgtctgaattttgccaccaactgactatgacaagctctttcacatctctgatcctcaagtttcctatctgaaaaaaatatatatctatatacatatgtgtgtgtgtgtgcacgtgcgtgtgtgtgtgtgtgattgccaagttctcttgtagaccaagggctcagtaaattacaagggttcacaggtcatttccaagaacacttttcctaaggatcctagaaaagttaagaattctacccggtggtgggtaatctttcaagaagcaaggggaataatgagagtggggtcttcttccaagttaaaaaacacacaggaggtcataatttctttagaagaatcttttataacatggtggaaaaatcagtcaacacttttggggtcaccgctgagtgcaaggtacaatactgtacagaggaatagaagacagcatcctgcaaggcaacamcattgaaaaggcaagcttcacatagawgaaagtatagaaataaaataagtataattaattgattgacagtaggtaacatttatataggrttatcgtggaaggcactgttctaagcatcttatatatattacctcatttcattctcccagtaacccttatgagataattcctattattgtatccattttctagataaggaaactgagacatagaaagcttaaagattttgtccaaggttgcataggtgttagagctgggattcaaatccasttaatctagctcttgattagttcatgytcacaactgagatataaaaggataagtggggccaggtgaggacagaacagagatgagacaaggagtccttaactttggcaggcaataagcacacaactaacttaataaagctatgagccagagtgttcagacctttacaagtcaagaggaagttaaatgaatcactaatcaatctcagtactctatcattctgagccaattaggaattttcttttcgaagtcctgctctccttgcatttccagagtaacaatgcaccacattctgaaacacagcattttatatttgatgatgtcaacttcacaattataagattcttcttttatgtgattatgctargcactgaagttcaaacaggaaaataatagaatgcttcaaacttatkaactacattaacgccaaacttatgaactatattaatgttcccatttgacagataagaaaagtgaggttcaaagaaattggctttgctcacaataaaatagtgacaaatctaaaagcaaagtacgtctcygtactttgtctccacccaatttgccatctgaagaaaattgaaaatataatatcttacgcaactttagtctggacaaatgatgattatgtcacattttttaagtcatcagtaaaaaaccttcataaaagtagtcacagagactcaggcttgggatctataggaagggatcttttcataggatcatgggccaataatggaaaggaagcctttgcaaagcaatgagctctcaggctcaggatctgagtgttcaacttgagggtgtttagaatcctgagatgccctgcttaggaccagagaaaagaaacccactttcccagataaagcagagaaggtcatcggatgataatcaacagacatttgaggagacatcaagaatgttatgaaaaggatttctgaattgggaaggcaatggtcaattacagctccaggatgctgtgatgatgatagtgatgatgacaggtggtgatgttcatgatgatgatgggtggatgacataaaagaagaaaagagccaggcacggtgactcatgcctgtaatcccagcactttaggaggccgaggtgggcggatcacaaggtcaggagtttgagaccagcctggtcaacatggtgaaaccccatctctactaaaaatacaaaaattagccaggcatggtggtgggcacctgtaatcccagctattcaggaggctgagggaggagaatcacttgaacccaggagacagaggttgcagtgagccgagattgcaccactgcactccagcctgggtgacaagagcaagactccatcaaaaaaaaaaaaaaggaagaagaaagaagaggaagaggagaggaggaggaggaggaggaagaaggagaaggaagaaggaagaaggaagaagaagaagaagaagaggaggaggaggaggaggaggaattttagtgtactgattaactacactaaaatgattattactgctgtttttaaattttcattatcaaatctacgcaaccatgctggtttgaaattaaccagtagccggccgggtgcagtggctcacgcctgtaatcccagccctttgggaggccgaggcaggtggatcaccaggtcaggatatcgagaccatcctggctaacatggtgaaaccccatctctactaaaaatacaaaaaaatagccaggcgtggtggcaggcgcctgtagtcccagctactcgggaggctgaggcaggagaatggagtgaacctgggaggcagagcttgcagtgaaccgagatcacaccactgcactccagcctgggcgacagagcgagactctgtctcaaaaaaaaacaaaaaacaaaaaaaaaaaaacaaaataaaaaaaaaacagtaagccaaggatgaataattagatcctctgtaattggttgttagaaggaattcaaacatttatctttctttgaattaactgctttgtggctaattaattttcaagctgctctgtgtaggcctctatgattgtgacctgttcttgggtagcactattggtaactattaataatattaataatatgggctttctgtggttttatcagggttgaggatggcttaaagtgattcttcagagccatgttcctggtttccctccagataacaagcaggttgccagcaagtggacagaggcctcaatactggagagtagaaaaagcattgccctgcaaaagcaataactgtgcagtctctgaacagcattgtgcttcatccagagagctcaacaactacaggatattctccaaaccttagctatgacactaagaagtggggttcagtctaaaacccagaccacmccaagaagtcagaaaagaataaaaatcatgtaactgtttattgcaaacaccataccaacaacagattggactgattttattatttcttgacctgactgaaaccttgtcttggtattgtggacatagagcctaagatgttgtgagacctctatttgccagcttcttgtttgaagtaaccatgaaatgcaaatcagagattacaaagttccaaagtgacacttagttttctatcccccaaaaataaaataacctgcctgctactagtcctctctctcattaaggtcaaatgtggggcttggtttaggctaattctaaggtctttttcagttttaaaaactttcccaccttctggaggaagtagatattccccagcttagtaactccaagatagttcaagagagtaggcagaagtaaggcaaatacacattgagtgctgaccttctagaagcttttaaagctagacaatgaaattactgagtactctggataatcaaaataaagttaccaccattccccagggctgccttgagcagacacgaagggcatcaagcatattggtctattagtcttggtttctcttctgtgaaatgaaaaggctacactagctggagatctcttaggctattttctattttaagagcctgagaatttatttttaataaaaaaaaggaggcagaaagacttcctggtaaaacatttccctgtgttcccaaacttaacacgaaacagtgcaagatccttaaatgacttaagtttactcatgaagaaagtcaatgcaaatttgatttgctgcatatatggatgtgcgctcttctgttctgttaaaataatgttagttcagagggaggggaagaactggataagctcatgcaaagtatccctcccattgtatttactcctgggctctcactggaaagttggcaggagggatggggataatgctctgtgaaggttttattaagrtatgaattattcttaatttwaaaaaaatctaattgccttgtttcttcttgatgtttccctcaacctcaaacactgcactctgctgcaaagtaactcattctctcttttyttaattacagtattctcaaatgagggatgaagtgttcaagtcaaacttggtctgtgcatttatcgttcttctatttatcacggcaatacaaagtttgcttccttcttcaaggtaaatgtaaaagaactaattgatctggtgaaatatctttgtgagattcctcatgtggagtcagccagctgacttttcaaagaatcagaatttaaaataactgagtccaggacgcataccaaaatgtttgacagtatcaatgtctattccggttgtcttactctgctaataatctcaaaactctgtccagacaataatctttttcccaatcttaataaaaacaacaaccaaaattaaaataggccccactcttatttgacatgacactcatgaatgcagaaaataggtataagaacctcaacaccatttacttgtgcttttgttagtataattcattcacagatacagcatcgtagctccttgggtccgcaaaatcaacactttaataataatgcaaacacctgtttgtggccagccactgttctactttacrtacaaaaacttctggaatccccatgacaaccttatgaggtaggtgccatgattatcctcattttaaagaggagggaactgaggctcataatagttaaataaattccctaagatcccatagttcaagatgttactgcctagattcaacccaggaagactagctctagagtctgggttcttaaccctctattaaacacatattgtccaggttatagatgctctagccaggatttgaacctagttctggattagtccaatagctatgctttttyctctcctctaaactataagctagctcctgcctcttttctcagctaaattgccttctccctatacttactatgagttttcccctttcacatgattaaaaataatatcaacaaatattttttaaatacttaatataggctaaggaacattatagcccctgaggatgacacagttttggaagaagaggttctgtaacctctaagacataatttagtaggtgacaaagacattaacaatggctcccagttactgagcacttatacatgccaggaaagtactacatcttttccatggattgtctcaaaaagcctcaaaaataactgatgagtgaggcagcattccaattcccattcgtagatgaggatttatcccaggtcacatgtctgtgtaatatcygagctgaaatttgaacccagagaccaagtctgtgcttttagttactagactgctttgcatcaaaattagtgattcattctgaccacatgactcaaggaaaaatttgcagaaaaggttttgatttcactaagatgagagaggaaaaagtaggagagtattccatttggaaaactgctctggcaaggccatacaagtgagaaaggccttgtgtttatagaatagtgattaaatgtaagagccaatagcaaagggcttgtgcaagaatatagtagacactatggctgaaaaagaagagaaccagcagaagttcaatgttcataactatgttaaagactttggaattgattctgagggtgagaaggggccccaggagatttttaggaagattgtagcatgatgctgtggaagaaagatgttcaagttaactaatatgcaagggcaggccatgcttgaccttccccctaattagcagaggacattagaaagagagaggggattccgggaagatgatgggacagatggtatatttcttaatctctcagaattcttacgaatctgaccaactagatagcaaaaccaaaaacctcatggactatatttataataaacaagggtgatagacccatacattccaatatagaagtgggtagcaacaatcccccaatagccccaaaatctgtgtgatatcagtacctgtatgggagaaagcasaaagaagtactgggcatgtcacaccggggaacaaaaggatctcaatacagccaacagatatgcactgagaagtgctgtgagccaaattaagaaagcaaatgaaagtgggaaggagtttgcccaatccaataaccttttgaaaggcatgaagagctggaaccatcaagacactatgaactcgtgaaactgatcatctaatctccctctcatgataaaggcctgaaaggaactgtgtgagtgaaatcaaaatcacttacaataagggctatacaggttaaagtgggaaggaattckagctatsatgttttgaaacactgcatgaaagcaaccaaagagaaagctctatagagttaaaaaaataaataaacaacccatgctctttctagaactctgaaccatgctctttctaaaagttcagggaagtgttttacacaaaaatgagcaacaaaatatattgatggcaatactatactattataaaaaataagagaataacaagtagaataatcttcttatagtcattgaaagtgctccagaaagacatgctcacaaaatatatcaaaactttaacctattcttttaaaagaagctgaagcacttaatgttgttcaagacatgaaataacaacctaaccaaaattagaaaaacttagaaatttggaaagacagctcaagaaataaataaaaattttaaaatatatatatttcagaaatgaagacagcaaaagagaacaaacagcacataaacgcagcaaaaattacttaagaaatatagaaagtgaaagaaagaacatcattttttaagtcaaaaagaaaatttaaaagattgacagagccttcttccccacacyttaatgtcacaccaacaaggaccctgtatactaaccacggatactaacagctgaaagaactgcaagacacagattctttctgaggaagagtacttagggaagcccatatcaagaggggaaactaatacactagaggaatttgaagctactggaacatacaactatagcaaaccttaaccatagcttaaytcccagccagagtgatataaatcctcacagaaaatatctatttacttcattttctattacctgatacaatatgaacagttttcaacagaaaattacaaggcacaccaaaaaaaagaagaggcaaagcaatcatcagaatcaaactcagatataacagtgttaaaattatcatacagggaatttttaataacttattaatatattaaaggttctaatagaagtaggcaatgtgcaagaaaaaatgggcaatataaacagagagatggaaactctaagaaaatcaaaggaaataaaaggaaaggataaaaatttaaaaacacctaacagaaataatgaatgccttcaatgggctcaatagtaggctcagaaaggccaaggaaataatcagtaggcttgaagacaggtcaatagaaacttccctaactgaaatgcaaagacaaaagtgaatgggggttgggcaggggacacgggtcaaagcatccaagaactctgggatgatttcaaaagaagaaatatacacataattagattaccaaaaggagaagaaaggagagctaagcaaaataaatatttaaagtaataatggctaagaatgttccaaaattaataatagacaacaaaccacagaatcacagaaacacagaattttaaaggttaaatactttggttaaataaaaataaccaaccaggataaacatcaaaaaaagatattgtattcagactgcagaaaatgcaagacaaagggaaaatcttagaggataccacagtgaaggacatcatcttaccagaaggaaggacactgccttacctgtagaggaacaaggataagaattacatcagactttttgtcagaaaccatgtaagcaagaagagcgtggagtcaagcatttaaagtattaaaagaaaaaccatcaacctagaattctatatcctttataagcagagaaaaaatactttctcagaaaaacaaaaactacatttttagccaacattccctgcaagaaatgtgaaaaatttcttcaaacagcaggaaaataatgtagattagaaacttggatctccataaagaaagagcatcagagaaaaaataaatgaagttaagtaaaatgtttttatcttaatcttaattgatctaaaacattattttttgtttaaagcaacaatattaacaatgtatttggtggttataaatatggataaaagtgagatgaacaatagcaatgtcacaagggacataaggaaggaattggtaatgctttattttaaggtaactgcattatacatgaagtggtatgaaggctgagttacattaatttaaaatgcatattttaagctcttgagcaaacactaaaaaaacgtttttaaagagagaaatataattgatatgctaggaaaaaataaaattaaatcatataaaatgctcaatcaaaatcagagagaatgttaaacaaggtgaacaaacaaagaataaatgcaatggatgaaaaagatagttacaaagatgatggatgttaaaccaagcacaaaaatattactctttgatgttaatggtctcaagataccaattacaaagcacagcttgtcagagtagataaaaaaaaaaaggccccaatagatgttgtatacaagaagcccactataggtatagactcaaataagttaaagaaatgaagaaatataccatgctaacattaatgaaaaaaaaacttaagtagctatatcaatttcacaccaaatagactcagaacaaggaaaattatcagagataaaaatggaaattacatagtgattaaaaaatcaattctctaagaagaacgagcaatatgaacatttatgtgcctaacaagagaatgtcaaactacataaggcaaaaacagatagaattgaaaagaaaaataartaaacccactattatagttggagacttcaacatccctctgtcagtaattaatacatcatgtaggcaggaaatcattagagatatagataacctgaatttacctaatcaatattaatagactattccacccaatggaagaatacagattcttctcaagctcacatgaacagtaaccaaggtagaccccattctgggccataatacaccttcataaatttaaaagaagaaaaataacacaaagtatgttctcagatcatagtagagttaaactaaaattcaataatagaaagatagctagaaaatcccaaaacacttggagattaaataacacactcttcaatcacacgtgagtgaaagatttcaagagacatttaaaaatattttgggccaggcgcggtggctcacgcctgtaatcccagcactttgggaggccgaggcgggcagatcacgaggtcaggagatcgagaccatcctggctaacacggtgaaaccccgtctctactaaaaaatacaaaaaattagccaggcgtggtggccggcgtctgtagtcccaactacttgggaggctgaggcaggagaatggcgtgaacctgggaggcggagcttgcagwgagccaagattgcgccgctgcaattcagcctgggagagtgagactcggtctaaaaaaacaaaacaaaacaaaacaaaattgaactaaatgaaaatgaaaacacaacttaccaaatttgtgggatgccatgaaagcagtgcttagaagaaaatttacattaaatgcatatattataaaagaaaagagatctaaaattaataacaatctaagcttctaccttgggaaactacagaacaaaaagcaatttaatcttgtaacaaaaaggagaaaataaattctaccaattagggcaaaaatcaataaaactgaaaacaggaaaacaataaagaaaattaacaaaattaaaatctagttactaccgaccaatatctcataaacataaacataaaacctctcaacaaaatattagcaaatgaaatctaacaatgtataaaaagaagcatacgccatgctccaacagaacttctcccaggtatataaagtttattcaacattctaaaatcaaacaatagtggttaactatattagtaagttaaagaaggamaatcatatgatcttatcaattgccaaataaatgcattggataaacttcaacgtccatttatgttaaaaactctcagaaaactagcagcagaagggaacttctacaacttgataaagaatatctcccaaaaaaaaaagctatagataacatcatctttagtggaaaaagactgcagcttccccccaatatcagaaacaaaacaaaaatacactctcaccacctgtatttaatatcatgttggaagtcctagctattgaaacaaaacaacaaaaagaaataaaaggcatacatatcagaaaggaagaaataaaactatgtttatctaccaatgacataactttctatacagaaaatcccaaaggacccaccaaaacatttctaagactaataaacaaataagtcacagaatacaatgtcaatatacaaaagtcaattgttttcctttatatcagccatctaacgttgaaatttgaaattaaagaaacaatattatttacaayagcaccaaaaatgaaatacttaaatataaatttaacaaaatttgtacaagaaatcttcaaaacactgatgaaataaatcaaagatgtaaataaatgaagagatattctgtgttcatggattggaagacttgctattgttaaaatgttaatttttcccaacttgatctataggtcaatgcattgtcaatcaaaacttcagcaagctgttttataatatcaacaaaccaatgctaaaggttgtatgaaaagacaaagaatatagcatagccaacacaataccataaaagaataacaacaaagctagaggattaatactacctgatttcaaaacttactataaagctacagtatgatgctaaagaaagaataaacacatcgctcaatagaacagaaagaaaagccccaaaatacasccacacaaatataatcaattgatttgtagcaaagatgttaagaaaattccatggagaaaggatattctttttaactaatggtactgataaaattggatgcccaattctcagcaaactaatacgggaacagaaaaccaaacaccgcatgttgtcactcataagtgggagttgaacaatgagaacacatgggcacagggagggacacatcacacaccggggcctgttgggggtggggggcaagggaagggagagctttaggacaaatacctaatgcatgcagggcttaaaacctagacgatggattgataggtgctccaaaccaccatggcagatgtatacctatgtaacaaacctgcacgttctgcaaatgtgtcccagaacttaaagtaaaataaaaaaataaattaagaaattgggtatccatatgcaaaaacttgaacctatacacagaccttaaaccttcacaaaaattaacacaaaatggtttatatacccaaatgcaaaactataaaatttctggaagaaaacacaaataaaattttggttttgaatttggtgatgagttttaagacacaccaccaaaattatgatccatgaaagaaaaaaattgtaagtcagactttactgaaatttaaaatgtctgatctgtggaagacactgtttgagaatgaaaacacaaaccacagaccagaagaaaatatttgtaaaacatgtgtctgggaaaagatttccacccaaaatattcaaagaactcccaaaactcaacaactagaaaacaacccaattttttaaatggacaaaagatttaaacaaacaactcaccaaacaagatatacagataccaaataggcatgtgaaaaatgctcaacatcattggccataagggaaatttaaattaaaacaatgacctaccactacatacctagtacaatgactaatatataaataaataaataactgtcaataccatttgctggagaaaacaacaacaacaacaaaaactctgtggcatatccagacaatgaagtaagattccattttaagaaggaataagatatcagccacacaaagacatcaatgaaccttaaatgcatattcctaagtgaaagaaaccgtctgaaaggctttatatatattattccatttatataatgttctggaaaagacaaaactatagaaatggtaaatagatcgttaggtgagaggagcttggggaatgagggaaaggagaataaaagagatgaagtccagcatattttttagggtagtgcattcagtatactgtaatggtatatacctgacacyatgcatttatcaaaacttataaaactttacagcacagagaatgaactttaatatatacaggctttaaaacattttatttaggagtttaggggatcccatgatggaatcagactgtgacaaaagaatctaactgtattaaaagtgtatgaagcaacctccctgaaggggatgtggggagtaaaatggtgtactaagtagctttgaaaatgagagaagtctgtaggattaaaggcaagagaaactgcacttaagcactgtgctgtagttgatataggaatttcccattgaggcatgggttaagaatttgcaacacctatataggtatactggaactaaacaattgtgtaagtggatggcagatggtgggagtcagttttctcattgttggaatggaagtttacatgcaaatgaagggagaaagttagaaatatcctggtggtaatggattagagttggagacatccatatgaactcatgtatagcttaatatagatagagatggttacatgtaggaatatttatagatatgtttatatgcacaggttagaatrtatacatacatttccttcctctgtcagtggagagggcctggaagcaatgacacctcagtggtaatgagcacatctaccactcacatcttggtttctaatgccgatatccaataaaaggaaccagggctccttggagaactgtctgagtctaacagtgagacaggaaatatacaagattagccttggcgatcttgtagggccagaaaataagaatgtgctaaaacatacatacatacacatgcatacacacacacacacacacacacacacacatatacatgataatgggagtatttcaaagggacacaggaaccaacaaaagagcccccgagggccaaagctggaataaattgagcaacaaaataaacaatgtaatatttatttataatccacaatataaaataaatatccacaagttcatactaatataaattaatgatatgtctcccatgcagagaaagtctacatattttatgaagataattcatcctcagtgaggaggaatttaattccccactccttaagtatgggcaacagcaaaagtgactttcttccaaagagtaaactatgtacagggggcaaatatggagaaacctcacaagcactacctcagccaggggataaagattaataccaacagtgataagttatgttaatgggatctagtaagtatggcatataacctctgtggtcttcctccccaaacccgtaatgtaatcatgaagaaaatttcagacaaatctcaattgagggacagtctacaaaacacctcaccagtattcctcaaacctgtcaaagtcatgtaaaacaagggaagtctgagaaaatgtcacagcaaggaggcacctraggagacataacaactaaatggaagatgatatcctggactggagaaacacctatggggagatttagaaagaatgaccaactcagcatccatgagcatacctcagggctagattatggtcttgaagtaacatatctgttttttaaaaaacaattttggagatatggctaattttagggctggaacaggaaatgtgctagatgagcctagaacatcttgtcctacaagaaagcaaggatgccatcaaacactattaggatcatatcaaaagaatgcaggagccacattatagaagttcccactgtccaaagatggaataatttgagctgcaatggggataattattaaaatacttatcaaaacccagcaaatatatttagctttatgagtttgtaatgatttttttaagtttgtagtgtttagtggatgatagggaaatggttgattatctggaaaacttgtaaaaaagtgagagaaaccagtggcttttcaccataagatcactaaatagtaagtgagggaaatatcataaaagtatcctagctataacattttaaagaaataaaagaattaaartatcatcatattccaacccataatgatttaatgaatctacaaattgagcatcagaggatgctatcaacacaaacaagagagacagccatacctcctggtgggggcgcacaccacctatggtcttgccaatgggatcaaacctaaatttggtcaggcctttgattccagcttccaattttcaggaattatagaggacagagaatgttgactaagtacacaccagtaaaatccagacagtgagaaatgctacgggtcagaggcatgtgtttttcgataaatacgttgtaaggaagataaaaggataaagagacaagttacagattttaagatttaaaagacaaatcagatttaataaaaatggatgagactaaactgtagtgtctataaagaaaggataaaactataaagaaatggaaatggaaagtgattaatgggggttgacagagaggattatcattgggacagggctcatggatgggcttttgtttttatttttatttttattttattattatactttaagttttagggtacatgtgcacaatgtgcaggttagtaacatgtgtatacatgtgccatgctggtgtgctgcacccattaactcgtcatttagcattaggtatatctcctaatgctatccctccccccatcccccaccccacaaatggatgggcttttggtgtgcactgcaaagttctatttcaggaattaatggtcatgaaaaaccaacacacggcagaacaaataaccaagagatacttttgtgtggttttctttatttatgcttcgttttaccatttttaaaaagttactaatgacttttgccaaatgtgggataggagtcctcccaccaacagccattggtggttattatgttccagacttattccaaacactaggaataaatctcaagacaaaaaaaaaagatgacaagaacaaaatccctgccctcctggaatgtataatctggaggaaggagactaagacataaggaatatataagtatctgtccaggtgtatatactatatatgtagctacttatagcatacgaaggtagacacatatgtagatatgaatatgccagccacggcgatagttatgtgttatccaagtaataaatcagaagaagggtaccagagaataccaggaaagaatgagtttcttgactacytaagagacaatgaggactagggtcctgaccgaaggcacctcggggtggcgagctgtgagtgttggtggggcctggcaggattcagccaaacctgctgggctcctctagtcactcttgtcaatgggaaggtggtagccaagaagggcccggccgtgtctgttgcttcctctggactcctagagctcaaggtgttaacattcctggcaaacactcaacaaacatcagtgtgacagtttgtgctggatagtgatggggatatacagtcagggtctctgccatcataaagctgaccatctagtagggctaaaagacaattagctgaacagctatcatatggggtgatgactattgtgataggaaaggtgtaagctgggattcgatgtgtgggagttggggtgaggcaaaagtagtccttttgcctctggggcaggcttcccagaggagatgacagtgacagctcacctggctcctaaaggagctcaccaggtcatggaaaaagactgagaaggattaaggggaggaagggctggaaatagagcattctgaaggataggagttgtgaagttcattgaggcgttgtgactggttggcagaggagtcttcattaaagcattttaatgaaagagatgatgtgatcagattcatgtttagaaggatcatactgaacggggatgatggagaggtgggagtgaaatctggatttgggatgaccaattaggaggcaactgcaaataaaaaatctggcacaaaataataaggagaagagagtggcagaagggtggacaggagaggaagaatttttaagatatttagggcagagagttgacggttcacagtgactggctggatgtgggggatgagagagatggagaagaccaggatgagcccgcggatctggacttggcactggacaggagaaggggccactgtcctccacgagaagcgagcctcacacttcccagcgggcctgggctggatttctttctaggtggtgtgacggggtgggggaggggagcaagccttgatgccctggttcctggggttcagggggaagagacctggaccctcacccagcagctagtcataaggagtctccaactctagaattcaaggtgaagcccataactgaaatacagcccacaccccaaccttacctagcgaggagaaaaatcctgacaaggaaggaaactgaactctgaccagacaatccatatgctgtgggaattgggtagcccatttaccccagacacagcaaaagctttctttaatatgtgctggttccctctccaactcattttgtttctgtttgatgctttgaaactaaacagatggtgggtgcttttcactcgcatttcttctgtcatggattttttttggcagatgagggagtttctactcatatgaccacagctaattcttagcccccaaagcaaaaattaatggactctggaaaaaaaaaaaaagagagagagagagagagacagtgcttacccagctctttcctttaatttccacatgcccacagatgttcctctccaagaagggtaaacgaaggaaagactagaaaatacttcttgggactatagaacaatgtatctggtctgcatgtgatgatgagaaagagacaaagacacagaaagagagagggggaggcagaaagggggaaaagaaaagggggagggagggagggaaagggaaaagaaagagaggtagtgacctacagagggagggagggaaggaagggagggagggagggagggagggagggagggagggacggagggaaagaggcaggcactgggtcttattattttctgtgcattatactacctatatgtatgtatttaacctctctgaaacctctgtttcctcatctgtaaaatgggaatgataatgcccacttgccaagactgcagtaaaaattaaattaaccaagcctatttctggcaaattcccttttggagtcacagtattttcatctgttgaaagggcttagaatatctttcttcagggttgctgcaaggatcaaagacactattgtacccatagagtctgtagattctaaagtgttgtccaggtgccatctttcagtataatctgagtttttgtttcctattgcaccacaagctgctataggctgttcactcatccccactgattcctgccttcccagcaaatgtcaaatcacaatatcaatacaaaccattttaaagacagactgcagagaataattaggacttaatgtctagaaatgatttggatagagctttgcaaaactagtcattctttttgagactcgatttcagaaatgaaaggtttccttgcctcttatgtgcaccaacaatgcaaaagcaaattcagaacccctggatgcctgagtggctctataattagataaaatgtacaatctgatgttataatgtttacatgtaaagaaataaatgaatgctgaggaactgctgcagagatttccagagaaatgtaatayacagtgtcagtacttttgcttaaaaagctaatcttgtaattaatacccttgccatagaactttaaagtgcttttggtttcctgaatttcatgatgaatagagaaagagaactaacatttctttaaatttttattatactactttatgactttgtttaatctcagagcctcctttaaaaggtaggcttaaaaaatccctgttttacagattaaaaagtaattctcagaggaatcaattaccttgcccatgaccacactactagttatgcttcagaactacaggttcaaacatataagactttgctcttgccactggaccacatggcctgtctttcacctccctttcccttttacagcaaacccagaagaaagccatttaaaactgggtcagggactcaggtgagttctgtgtgcaaatcctcccacacagccctatagataccctgatgaactccccgccatgccaaagattacacataagttcaatcgctaaatgagaaaaaaaaaaacatcaattttacaaatttccaaacaattgcccatttagcctatgcaaaactgtgataaaagctggaatacagaatgtggctyaagtcaagagaccacatggcctccatcctgaatctcttctctgctggccctcatatcccacagttaaactctggtgtgagatcctaccactatgatgctgcaaaagattaaaccaacgcactccaccagtgtcaaaggtgaatgaggcagacctgagacggtgccatctgtggccagagccagggttaagccaacctgggctttcttccttaaaggcagagatgccctggccaaagagaagagatggccagccctcctcccatagggtagatcaaggctctggcttccctgtcatctcagtggatcgaagaggaggagaatataagtgtctgaactgtgcatatatactgacctttaacaatggccctgccctccaaggaaaatgaggtccactgagcacccccgatagtttctggattagcccttcctccttccttggagagatatagtgagcaggcagggagatagtctgggcatgtaggtggaagtcttcttccctgtgaaggctgctgaggggaggagcagagtcttctcttcccagaaaaagcataagtcaatgaatacttattgagcaccttctgtatactcagccctatgccaggtgtcatggaagaatccaaaggaaagctgagccttgcaggaataacaggacacaccatgttaagtgcccataaggcagaaagtgcatagcactggcgacagactgcacatagttcagcattgyccagaccatggggtgcagaagggtgagggaggaaaaaaaaaaggcaggagagagagccaagagcagacactcaaggccctgtatgccatgtggaggtccacaggcagtggtggccatgtaagaatttgaggctccaactcagcgtctttcaaagctgcctttccctggtttgcttctgtctcacactttgaaaagagacatttttatactcgttggtttcctcatgtgaatgagccacatgagccttgcaattggccccctctctcatgggacttcctgacaaagcgatccgcctgcattctctttcatttatctccccctggtgcccasaaataatggtgtgttgtcagggagtgtttttccagcctgtttggagggaagtttcccatctgcctagagccctctgggaactcactgatgcaccaaccttctgttcttatatagaactcctacagagatttcttgtcaaggtgatccataaaatcaaaactttgctagtcaaaaacaaacaaaaaaaacctctaccaacaatagctgaggctgtgggaggagtcactttccagccttaaagtagcctcatcatgcagaggaaattgacattcttggttactctttccttgtgaatttcttatcccccctgctgccatgatgccatgcactcctgctctcctgcttatctaaccacacttcataaactccctttgctgtcttctcttcttccagcccattagcatcccccacagctcatcttgggtcctcttgattcttgctgtacacactatccttgggcaaatgcttccattccttgatctcaatcaccacctattccctccagcctcagagttcctcaattgtccctcactgcctggacatctagatatctgtaactgaatgatctacaagtaccaaacatgcattgtgtccaaaatcaactttatcaacttatctcctgtacagactagcttcttttcctgcatttaccagttacaataaaaaacattaatgtcatcgttaatgacttccctctctcaaataccctctacacatacatacaaaacacagattaatatacctccacatctttccctgcaccccccaattatcatactgttcccctgtgttcctccctcattaactcatgccttaactatttaactcttctgaacacgtttcctcttcacttcatcctccacctcccaccacagttgtctttcaaacacgcagatctgattacttccttctgcacattgcctacaggacaaagctcctgagcacagccacactgcctgggttactgggaaactctgaagacactggtcactcccattcttctgatgttttgctcatgctccccactctttcctacctgcaagccttctctttaaccttcacagcctaacccaatgtcacctcttttatgaagcctcccttgattccctttcctatttttcagttgatgtttgtttagaactctttatagatcccggaatattatataatagttcatcatttgcatgtttatattcctctctcaattataatcacctagatgaggaagatgtgtctttggccccagtaccctgatgcctgccactgtatacctgggaagaagacttgttgaataaataaatattatgatgaaaccataaaagcaaaaaagatgattgcaaacatgggagatctattactcaccaaagtgattagaatatcagaacggtataacagagtggactttaaattctggctctaacactgaccaactgtatgatgcctgggaagtttcttccctctgagccttgaatcttcatctggaaaaaaagagataaaaagacctctttggttcattctaaggaatggaaattagatattatatataaaatgctcagcatagtggctaacacataatcagatctcgatacattatttatactagtgttattaataatacataagaagtttaaggaggaggatagtaagagatggtgttaggaaaagaaggtgagttcaactttatttgctgaacacacatttatttagcactggccaatggaagatattaatgccagatgaataaacctcaatttatagaaaaaggagcagatataaaatttccctccacttctatcaaggtaccctttaacacctgcatcagtttgctgcctgaaatagagatggaaaaattagagctgccagtgtagracatgaatggctacacagagttgagaacaaagaattaattcccaaggagaagcagattgcatggtgataaataggttgatagsggagacaggagttaaagatgcctccagagatggagttttagatcacagactgactaagcatcctgacaccgagcacaggtgtccaactgacacaggctaccatgggacagagttttgatgagagtttgaaactcragatgtaaactcgagagtgatgctgatgccttggacaaggatgagttctccttacccatgtctcaaataacttatggtatagtccatgaaaaccacaaaaccaggaaccaacctgagcaacttaaaaccaatgccaaatccagttcttggtatcaggataggtggagggggaaatcttcayaaaacccaccttgaagggaaaagggtatgtgggttcatcccacagccagagtgttgatatcaaactagagtggtgtgttgccatgacagcaattgcctagtgacaaaaattaatargagggaaaaaatgggcaggagcaataaatcaagccaaatattctgtttttttgcaaagtttctcaatagagagagtgctctagggatgcatgtaatttttaaaaatctctcctgctaataacctttttcttggacaaacagaactttcaaagaagtatccgatgcaagggatgggaaaggaagaccaggaatagaatttcagtgttgctcagacaattgatgccaatgacccaacattctgtgtttccctgcagagtgatgccaatgaccatccagttctccattctgattatgctgcactcggctctggtcctcatcaccacagcagaggattataaatgtttgcccctcatcctccggaaaacttgctgttggattaatgagacctatttggcccggaacgtcatcatctttgcatccattttgattaatttcctgggtgccatcttaaatatcgtaagcatcccacatccaccaaccctctggtgtctagtgtgcagttgagcatgaagtttatggagcctgcagcttcctgcattacccttccttggtaccagttacctttatgtgcctggtccagccccaagcttagggacagataacaaagatgtggctactgccaaaactgtgcattttactgttggaaaactgtctatttcccagtgggataggttattttctccaaaggagttccaaaagcccttcaatttccatattgtcagtagccaattacatcataaataagagttaccatgtatcaagtaccagtacctacctgctatgtgccatgcactgaaggaggacctttacatatttttcatatttaatcctcacataaaccccgtgaggtaagtttaattatccccactttatggctgaggaaactgaggctcagagacatgaaataacttgataataaggtctgtctgactccatgacccacgcccctctaatatgctaaattgtatctctgggagtgggagtggggtgggggaaatggaaatgaaatagctgccatttattgagcacctactatgtgctacaggtaggtattattgtccccatttaatggatgaggaaactgcatttcaggaaagctgagtatctcacctatactttctaaaagtttgtatttcacgtgacacatagaactcagatgaatttccaactgccatgatatttatcactgtttaatttgctgacccacattgtcatggtttcattttttctcaagaattgtaccatggtagctataggtattttctgtgcttttacaagtagtctgtgttgtccatgactcargcagctagatttttgaggtgatttgtttggttccaggtcttaaacttggcttgttgagagaggctagttgaggcattgtcatgtggttgaatccatcactgtgccctttgggcctgarggagggtccccaagtgtgcagggacccaagctatagactcccacaattgttggcctgtgacttggagccctmgactrcctgaaatcactgtccaatttggcccagtaattaccttacttaagttctgtggttgtccttctagtgaaggctctgtggataaaggaaaagaggaaaaggaaaattatcatctaatttagttcatcatctaatgaatattttatagattatgataactgaaatggaagtacatgggatcaattgatcacaggctgcagagaagcagccaggaccttaaattaagtcttgataacaaattagatatttctggggtgcagaatttgtaagtaagcccaatgactgtaggtcagggttacctctgaggccaacygtgcctcagtgagtagtgtggtaggaagatcagaggctttggagtcagatagacctgtgttcaaatctcagatccaccagtcaccagctcagtgacactggacaagttactttacttctcagagtttcgtatttttcaattgtaaaatggggattaaaaatagcagctacatcacaaggtggttgtgaggcttttttgtacaaagtgtctggcacagaggaggcatttggccaatggtagttattcttttcctaataccacaaaatctcctgcagcaacttctgtcctaggaaatgcccatcaccccagtgctaagagtctttctggaaaatgtaccccttcagattcttcaagtcctcccagctgttgatctggagacaggctatgagtttacccaagacctcttctcctgccatctggctttctcttctgagctccacaagcacactccagtgaccttaaatgatggggccaacagagcagtctaaacttagtttcatgactggcttacaaaaggtctttctgagcaagcacttgttttttaaataaaagaaatcaaagctggcactttggcacttccattctgacttcaagtcccctctagggttcagtctacccaggctcgtgctgaagcccagccactgatagcacactgctccatttccagcactcacactgactttgttgttcctgtttttgtttttgttgttcttttttttttttttttaatccgcagctgtggtgtgattttgacaagtcgatacccttgaagaacctgactttcaattcctcagctgtgtttacagatatctgctcctacccagaggtatttatttatgagctccccttggtgagagttggacatagatatrtctctaccagctccaaataaacaagactggctgaagggccatagaaaatactcaagaggcctgttttccttcttctgcctcttcttctttcctttcttcttctttcccttttctgcctttccttctccccttatattttctgtttcccagtcctctttcctgtcccctcctctgcctctttttcatcttcaccccttcctcatttctttctccctctttctcttccttttcttccttttcacctttccttctatccattttccatttgcccttatctcttccttctctatgcatttctcctagcttatttgtaaaatcctgtagcagaatgcactgttatctctattagcaggcagagttctttctcaaacagtatttgctgcagaaggaaagagggagggagggagggaattaaggaacaaaggaaggaaggaaggagaaggaaggaaggaaggaaggaaggaaggaaggaaggaaggaaggaagggaagggaagggaagggaagggargggaggggaggggaggaaggaaggaaggggaggggagggaaggaaggaaagggaggggagggaaggaaggaaggagaaggaaggaaggagaaggaaggaaggggaaggaaggacagaaggtaggaaggggaaggaaggaaggaaggggaaggaaggacggaaggtagtaaggggaagaaaggaaggggaaggaaagaaagaaggaaggaaggggaaggaaggagggaaggaaggagaaggaaggaaggaaaaggaaggaagggagggaggaaggaagggagggaggggaagaaggggaaggaaggaaggaatgaaggaakgaaggaaggaaggaagggagggagggagggagagagggaagaaggaagagagggaggaagggaattacaaaggcagaaaattagaactaaacttaactgatacaaagagtgccagaagcaccatgtgttctgtaggcatcccaacaggccacctatgatcataatatgtgtatcttactctatgtttaccacagagccagtggtctgtttctgggccttggggtcagcctatggggtctgttattcacaacccagaactttacatattagggtagacattctgggtcataaagtagaacagttaacatgtcccagcagaccccagccaaccccatacctaggactctgggtagattcttgttctctaagaggctgmcacactcagaaggccctccaacatatgaatggagaaaaggctccctgtagtctcttctaggcctaagaattggtcccagaaacattccaacaaggagaccaagcctcctctccgtccgtccatttgcatagagcacctgcttgatatgcataacatcatcaaatccttcagatgtctggggtagaggctattactgtctccgtcttatagataataaaactagagctcagaaagcagcttgctcagtgctggttagggccacacctgcctgatcttatttcttcctcacttctttccctcccttcttctttctatccttccttccttcttttattaattcaattatcaaggcttgatactataatttgaaccatatctaccttattctttatcttccctggtccctagaggagaaagtagactctactaatggatgtgcaggacaggatgggactaggtcccatttaggagctgcatgggccagaccatgtgccctgggactcccttctacctaggaatgagtggagtcccagcttagtgtactctgtgggacaatggctccctgagaaattcttggtttgaggggcttagggaatgtctcaacttttggagagagtaagtggcccagaattggatggtcagagctaggcgaaagctggttttcgtttccaatcaagccccctcacttgctagaagtggaaccttgaatcagttcttaccctctctggacctcagtttcctcatctgtaaaatgagaaaattaataccttctttacatggctactgtggagttaaacaatgtgttctcatggtgcctgcctagatgggttagcaaatatttagctcttcacatggcatctgacatgaagcagctatttatctgtgcccacacatcactttgaattaatattgtatacccttgacctaacacctgaaccsccaaacacaagaccacagcactcagagattagcmaaatcctaagaaagtggtgggtaagatttttgatcacacagctttgtttcagtgcctcagtttccttatctgtaaaacggggataaaagtagggccttccttattggttaattacaagaattaagtgaattaatccatataaagtgtttagaagccacacctggcacaatgtatctgctcattaaatgtctgctatgatttatgtattattttcaacaaaagggctttgagcatgtaatgccaatgtatgttatcgtcaaacacctgtacatacccgaaccactgtgcgtaatatacccgtgtatgttatgatacaactcaacaacagaaatgtttaaaagtaagataaaatgaatatggattgatgttaccattttctccacaatgaaayggtcatcttgttcaggaggtcagcaaactacagccacaggccaaattcaccagctgcaacaaccacctgatctgacccaccagttgacattctgatacatgtatgtatgtgtgtgtgcatatacgtgtgcatgtgtatgtgcgcacacatgcttcactgactaggcattgccaaactaaaatggattagatattcagaccttctgaaagagttaatccaactccccagcactcatatactcacaagtatgtgtccccaagcaaatcgcttcatctttgtgatcctcagtttcttcaaatgtatacctgacatttctgcctcaccctatgagaaataatatccagtccaaaaacatgttatcaaactggatgatgtaatacaaaaaatgaggcttttacaatgtatgatataaagtataacttggttctaaattcgaagcttgtcagatgctaaaaaagagtgaagatgccaggaatgaaagtaaagaaagctatattccagtcatggttggagagtagtcaaggagaaagaaaggcacaggtttgtgaaatgaatgcaaatcacatgcacaaacccagagtgtcattatctcaaacatctggatgtggttctcaggagattcggtgggaagaccctcactttagaattacgcccctttattatatgctctggcacatctgaataaacagttcactgtatctgcaagagcagtcagagcttgctatggttttaaagggtcctgaagagcccatttttccatagagatgtgatcatctgtgtcttggcatgctggcatttccttccctttcttctccatttattcaggtcctacccagccttcaagcatccctttttccataatgtggtttgacaggcccaactccttcaggtcactctccttcctgccatctcacatacccttatggtgtcatcttagcattcacactccatccttcctacagttgatttatttatctaggacaycctttccatcctgtcaaatttattgacgtaaggagtgaagataatattgtatagctattaaagattgactaaagggcccagcacaggacaaggcccacaatctaygttttaaaatatttaaagagaaaggaagcattcttccaatagactaacaggaacaagatttacctttccatctgaaataactaaaaacaaacaaaatatatgaagcaatagttttcaaggcactgggcatcagtcagtaaaggacaataatcctgaaagacaggaagcaagtgattgcctgagctttattattgctttaagagaatttttagactatggctcaggaagaggaaaccaaggyggactccctgayttgagaatactaagctgagagtcctgggagaccaaggtggctacagtctgcagaacatactactctggagagttgcatagagagaaaaacctagagatctgaaaagggttcaatcagtgcatgcatgtgaggaaactgacatgggaaaagaaccatctggaaggatcagtacctggaactcacacagagctgagaataatttttgttcccaccagtcagactgagaaagattcatggggtagtaggttagagtattcagaaaagtcttgcttcagcagagtaaaatcactgtttctacatcatatgctgctctgatccttcctttaaaatcttaaaagttagatccaaagagatcaaaccttttaaaataatttaatatgtgtcctagaataaatttcaagaatatgtataggaatacaaaaatatctaggatttaacaaggtaaatacacaatgtctggcacccaatcaaagattactggcatcaaaaggaggaggaaaatatgactgataatgagggraaaaaatcaaccaaagaagaccaactcagatttgactgagtatatttgaattaactttttttttttttttttttgagacagagtgtcactctgttgctcaggctgaaatgcagtggtgcaatctcggctcactacaacatccacttcccaggttcaagcaattcctgtgcctccacctcccaagtagctgggactacaggcatgcaccaacacaccgagctaagttttttattattattattttcagtagagatggggttggccagtctggtctcaaactcctggccacaagtgacccacctgcctgggcctcccaaagtgttgggattataggcatgagccactgcacccagccaggcaaataattgctataactgtattcatgatagacaaatattagatagtgcagaagaaaaaaagtgaaactgataacatagcaatataaagtatccaaaataaaacacaaaaattaaaaaataataaaataaaagcagtactggggacaacttcaagcagcatactatatgtgtaattggagtcctagctgctaacctaaaagaaagactaagagaaagatgaggagattgaaaagctatttaaagaaatggtggcatgagtttttccacatttgttgaaaaccatacatccacaggttcaaaacctcaatataaacacacacacaggcacacaaaggcacatcataatcaaattactcaagccataataaagacaaaatcataaaatgggtggggggaacatattgcatagtaaaagacaatgatatgaataacagcagatttttcaaaaatacaaccatggaaaaccagcatcttgaatgaatcaaaggaccactaggagtgtactagagcaccaaccacatacaaaattttcttttcccctaattaacacaacccagtgaacaccctggagagtcagaccagccatcttcccatcaccytgtggtggtccccaggtttatgatgccctccttgctcgacattctgcagagtctaggctggtctcagaagaagcagagcagcttctgtcatttgcctggacacacttcactgtgttgcttatgccaagagctacagttgctaagaatcagattttgtgtaaagcaataagtccagatgatttctttaaactatagtgacttttgaaaattgtctgcttgatttcttttcttcttgtctcatgagttcatgatgttatgggattttggcagcaaccagatagctccagggagtccagtttgtctgacttatgtgggtagatgctcaattccctcgtcagttatcattgtctaaaataattcttcttcctcctcttctaagagtaaattgtgcatatattgccaaggcaattcatggtgcattgacaatgtccttccagcctggcacagtttttggtgtgtagtgggttctcagtcaacaattgtgggaaaatgcatgatttagtttgtaaactgtttgtttcatggaaacaggttcagttgttgctgcccttaacaccttgtcatatcatgagattccaattttttcagtacagacattgaagaaattgatctcccaagccagaatatctatctgagagaagaaaaccttgtatattcagaagaagaaaagtgttacatatacttcctctcttctttaaagtggacccaagaataatacctgtccttgggtcatttaaggagttaaatgagatgaaacacataaagtcattcaaagwcattcacagaatacgtgcccaataaatatttaggtttaattgttwcatctactttccaccaacttaatcrctgatttacagacatccccaacccagctggtccctccaccaatcttacctggagttcatctaatgtaagatgaatctggtctctttcacacctccacgtctgtaggggttttttgtcttctcctgtctacattttattttacctattgaaatgcctttgacttctttttcctaaccaattttttttaacggtaaaaactgaggtgtcattatatactttcccaaggcaaaggtgatgcacttacaatgcatagcttgtctgcttcctgtatcagagrttgctgggaactttgctcactacctaacatttctcatacaaatcttggcattattattttttatcattaaaaggtctgggaaaaaacagagaaccccattactatatgggagtcagagttctctggagtacagggatttaccccaaaacactgtattcaacctactgtttcatttgatattgcacattaaaataaaactaaaggacattacaaaaggaaataatccactcaaaagccatgtcatgtctgtgtagacatattttgcattcttgtaatcatagtatatatataattttacaccctgctttccagtttaaaattattttgaaaactctttgttgtcatttaaaaggctcctctgaaaactcttgtwtatagagctctttattcttcgggcacatgtttcttcactattgtcttctagttctcctcctcacatccccaaaaatgcctaatcaatattcttatttctcttcttccacagtccttcaaacatggtaggctctcaatgttagtctctgtatcttctgtctttacttgtattctgcttgagtggtttcttccacacctgtaagttcagctgaatgatgctaaatgtgtgtctccagaccccatctgccttctgaaccccagcctcatttatgtcattgctcactaaacatccttcctgaatcaccccttctatacctaaagcttgataggcctaaaaaaagaactcactgccttttcctcatactttaagttttttcttacttaatagattaatacaaagtggaaatattagtgctacctctgactcctctctctttcttacctccccataaaactagacaatgttgtccaacttttatatcttgctaagtttattgggtatatttgccaagatcttgtctttaagtcctcagcttttctcaattaatcctgatacatcgtatattctaccctaccgcaatttatttcttaggcactgacctaatgaatccattacaagcaagaaactcatccgtggttccttacggactgcagaataaagtacagatttccatactagaggattttttacagtgtggttttgccccttaactctgtcctactatacctatgagccccttatacccaggatccatttaggggacactttaggagctgtgggccttctaagttcctggagtaatataacacaaaaattgcttgttttttgacagaaactaagtaattgcattgagcccagtttcttcccaagttacaggacacatgcaatttatgggtccagacccagcaaaagagaaatgttttcacaaagctttcacaaagccataatacttctgtagcttcctgttgttctcccatttcctggtcccaccccccactattcactcaaggtataaaaagcacagaggagattcctctgatgttgtccaggggcctcattctgtttgatgtcccacggttcatatcacctccaaaaggttcacctttctactttaaagtaaaaagttacctaaaccatgcaaggcagtgggtgattcctttagatggaatgggggataggagtaaagaaggcaagagcatgctgccacaattgattgaggcaacaaaacgagaaagacccatcaacacattgtgcaaatgtacaattatatttgcctattataccttcagcagccttgttagagaaaggaggagggcaacaccttcaaatcttttcttctgcttgtgttactagttctctttatgagtagttgtatgattctctaatatgacctaaggaatcaatcctcctgacaccttgttcctttacacttttgcattcatgttattctgtcttcctaaaatgcccgtycctttccattttctactgtgtgaaatcctctctgtccttcaaggtccagttcaaactcatgtcccctgtatagccttcttcagatgtgcctgcagaatgcacaacgctttgtccttcctctgtacccacattgcatttggtcacattgctggcaaagcactttccaccatgattattgtttgtatttttatgtctgctttacattttagaccacgacttcctttaggcctgggccatctcttactctcctttgaatttccagtgcctagcaccatgtcttgattgtaataggcactcaataaatgcttattacattttataaattaactgttgtgaccacataagtttttgttccaaggacacaatcatttcaatggctttttatccaataaatgattcataatttgcaaaaagccatgcaccgccccttgttgtgatacaggcaacaatgaaacaggacccctcagatctagtcctctttctttggcctttgtcaaactggagggccttagagtttctctggagcagaaaatgagctctggagaatgaacttcttattgcccagtcacttcagacacagcttcctatacagaggcatcaaaatgaattacctaaaaatcttccccaagatcttaaaggatagctgaagaaagcctatcatcccatttgagaccagaaaataattggatttcttggaaaaggaaaagacagaagtaaaggagacactagacactaggctcctaatggcaaggaaatgcctttttcacttatgagtccaccccatgtaccacaaaggcatggggcctttgccctctgagagaacacagtcaggacactctccacacttgtcaatgtcaacatttgttgaaaggatgcataaattagccagctaggcttagaaatctgtaaacaatcttcagtaattacttagacatttttggaaattcttacccaacacccctgcccatacaaaaattgtctatgtaatagaaaagacaagttgttacaaacagccatgtataacaagaccaaaaagaattttagaaattatcaagtccaatattttaactagagtcccatttacgtgaattggttatatcctggtgacctagatgccactttatagccaagagatcttggacaatttacttaagctctatgaacctcagtttcttaacctataaaataggaattatgactcccatcttgaccagttactttgaatgttacaagtgaaaatgtgtatagagatcacaatattgccacaaaatgggcctttgataatgcaagttttattctttttgttttttgttcctgatagtcagagtctgaacccaccatccagaatgatatattaggatacttctctaagggaaggaataggctggggagcttcccataaaaggctgaaatctggtggggtagactgacacctaagggctactctaatattccagctcttggctaattccaaatttgcaatttaagcagttacttctaatacagggtgataggtgttatgctggtctatgcagggtgctgtggaggaatgaagcaagatccaaacgtagctggagatattgaggaagtcttcttagaggagagaacacctaagctgacatttgccagaagagtaagccctaggcatatggatgagagtcgagcaacagggccctgggacttgggagaagggtttagagaatgaaaggaaatctgatatatgatggccttgtgagctttactattcagaaaggagaatataatttgagatagtggagagccatgaaagaacttcaagttaagaggtgacatgatcagatctgtgctttagaaatatggagtagagaacgatatgggtgtggggtggggactggggactaactgcagacagagctgccaaaaagctattctagagctgttggtgagaactaagacagaaacagtgtggaagaaggctggctgaagggaagatctattaaagaagaatcagccaggcatggaggctcatgcctgtaatcccagcactttaggaggtcaaggtgggtggatcatctgaggtcaggagttcaagaccagcctggccaacatggtgaaactccatctttactaaaaatagaaaagttagccaggtgtggtggcatgtgcctgtaatcccagctattggggaagctgaggtgggagaattgcttgaacctgggaggaggaggttgcagtaagccgagatgataccactgccctccagcctgggtgacagaatgagaccccatctcaaacaaacaaaaaaaagtagaatctaccaacttaggatggcctgtgtagggaagaaggcaacaaagatgaaaccaaagttattggcttgggaaatgctatgaatagtgatgccattcagagaagtagggcttggcagtaggcaaatgaagagtttgatttgggacctgttgaatttcaggagrccttgagacctccaaatggaaactctctgcaaatgtgtgtaagacctactagcatccatggctaggagagggaactgctgcccccattgaatctgaccacctgcattctctgtttccagtactttgtcttcacgggggtgttggccatggtgacctgtgcagttttcctccggctgaactccgtcctgaagctggcagtgctgctgatcatgattgccatctatgccctgctcactgagaccgtctacgcaggcctctttctgcgttatgacaacctcaaccacagtggagagtaagtgcccaccaccgtgagtccaaagtgtgctcaacttcctgtgggaagtggaatygttgggaaaatgatgcccgctgcattactaaaacttaaggcctgattggatattgacttatatctcaaatcaggcattctgtagttyacaagtccaagcaaaaatcctgacttttcagtggtatcatttatatgaattacagatgaattaatcaaagtttggactgaatagtagctcaggtctcctccaagtctgatcacttatgatttcttcaaatttagtggcttcaacacttgtaggatctgtttgtaatttggctgtagcaatattaataatagcagccactgtgtattaagccctcatgctctcccattgcatcgtacagttggacctccatatccacagcattgtggattcaactaacttcagattgaaaatactttaaaaaaaattaaaaatattacaaacaaaaacagtatagtttaacaactatttacatagcatttacattgtattaggttttataagtaatctaaggatgatttaaagcatgggggggatatgtataggttatatgcaaaattatgacattttatataagggacttgaacatgcatggattttggtatccacagggctgataccaagggacaaacgtattactgctgaaatatagaaaagtacaaaaaagaatatcttacccagactccttagagaaaaacagcccaaggcaaggctaatgaaaccccaaggcagtgaaagtgagggaaaagagaagtgaggaagaaaaggatgagaggcgaatgcaagctaccactacattttgctggcaacatgggctctgaagagattcagctggtgccttggaaaatccactcgcagagccatttgaaatgcctctgggcaggctctaaggtgggaaaaagtgtctcaggacagaggaaggcagaaaaatatgtctgctggctccttccctgtctctcccattggcaagagttccctttttgcatgcactttctgatgacatcacttggaccctttcacagctgctggggtaaacagaccccacacaagaagtgatggaaggagccagtccaggctgattggtctcaggtattggaagcacacaggactagctgaggccagaataagtggccaacagtcaaaggaaaagaataaggccaagataatccaagaaggctaagaaaatatgcccagaactaataatatgaatgtccatgaaccaagccctggaagtaaacaatgctaacaactagtcatattttcttatgcatttttaaaaggataatgtgtttcagatgttgaaattcctttctctagtattattctcctctctgtctcctcaaatccaacttctaatgtactgaatatatatccttcccatccatgttatatatataatgtatacatacacacatatatacacacgcacatataaacacacacatatatttacatatacatatagctaggtctgtatctataaattatttataatatttactattttgttgtgatgtaatattatctttctagatccatctaggttgatatatatggatttcattttagttgttgtctgtacatatgaaataacacaaacatcaaaatatgtttatcctttgacctattaatagagacatttaggttgttaccagttttccctattataaaaaatgctttaattaccatcattgatcatatcttctggggtgtagacataaaagcactcttgttggattgtagggtatctgcgttttccactttttaaaatattgccaaattgctctccaatgtgactgacacgattttcctcttacaagcagtggtcctgttgctctcattcccacctacactgttagatttttaaaatatttgtttggttgagtgtgtgttttattgcactgtttacacttgtgcttctctgattatgtgtaagcttgctcatctttttgtttatttgttggctatttgggttttattttatgtgaattgccagctcatatcctttacccagttttctgttgggttattcatcattttcttgttgaatttgtaagagttatttttgtttttaattaacaaataattgtatatacttatggtataaaacatgattttttgacctatgtatatgtggtagaatggctacatcaagctaattaacatatgyattacttcacatgctttttttgtaggtggtgacagcacrtaagatctactctcttagcaattttcaagtatacaatacattgctattagctatagttgccatgttttacaatcgatctcttgaatttatttctcytgtctaactaaaattttgtatcctttgactaaaagctcctcaatttcatgtcacacacacacacctcaagtctctggtaaccataattttactatctgcttctatgagttcaaaattcttagactccatatataaatgataacatgcagttttgtcaacaagagtaggcctaccagtagtgaccctgtgctcagtttgctcataggtaaagtgacatatatatcatctgtctatattagtcagctcagttggccaataaccaaaataccacagactagtataaatatcagaaatttatttcccacagttctggaggctgggaagtcccagatccagattctagcctggctcatttcattaacataatgtcatccaggttcatccatgtggtagcaagtggcagggtttccttctgttttaatgctaaatagtattccattgtgttcgtataccacattttctttttccatttatccactgaagaataatttcagattgctctctcatgttcattgcagcattattcacaatagccaggatgtaagagttctttataaacttcagatactaatgtctaatttacatgtatatcaagcattttgtgtgctttatttaatcttcagagtaacattctgaagaacaaaggctaagaaaagttagcaattacccaggttcacacggccagtaaataacagatccgtattcaaacttgggtctttttgactccaaagtccactttttaagtactgtgtgcaccgcttttaaatcatactgaataacattccaccatattccaagggttcaaagaaactcaaaacattttcaaattaggtaagatggttagtggccatggatatatcatggccatgcaaaaatgaacacaaaagagggcaaagatatgtatgaacaaaataagccacctttagagtaaaaataaaagtaaaaccatctacaatttatggaattaaaggcagacacaacattaacggaataagctgggtctttggcttcaaatctagactctgttgcatatgcaaagtcatatgaatttgaggggagacaattcatttcatagcattgccctagggctgctgtgaggctgttatttgcctggcacatagcaggtactcaatatatgttgattcctattccctctctccttcttatgagagaagcttagttctggattctgtttggaggtcttcaggaagagtttgtaatcaaattaactaagatcatgaaagtaaatataactccaggttcattgctgctggcgatcaagtgcttttttcagctttttcctgacttgagaacaatcattggctagtcttctattgccttactctttgctatcaatggaatgaaatcaataagaaatgaaggaactcagccagccttccatctcagctgtattataaatctacaggtcgatagtcactcggtagtgaattggcagtcgtaggctactcacgctgtttggatttaaccaacactttaggagttcacaatagttcaagaatagtttttgctggttgttcctatacattaggtatctggggaaaacagataaaatgtaaaaggtagcacagaaaaccctggacacaacaacctggccgcatcttcattgggatggccctgaatacttcacactgacatctcccaatctgctcgtcaaactrcctgtcccacaacaaccctctgatttagttcatgatgcccagcccaaaacaggagaggcacccttacccctaacatcttagcmgtcactagagacccatcttcctcagcatttcttgtagggaagcactatatctcaatacttgtgagtacaagtttaggacttaaaccaactgaattgaaatcccagctgttccatcaaccagatatgtgatcttgatcaaattratttaaaatgatttaacttctctaagccctgtttttctcatcagtaaggagggaataataatagtccctatgctgtagaaatataaaaggaaacaagtgtgataatagaagcttagcacaggtctggcatatgataagcacttgatatgtgctaatgtttgttattagacatcacccctccatatcacaaatgctgccactctggaaagatcctcactctcatctctggactgatgtcctctaactgatctcttaaactccactctcaattccccctcctcaaaggcatgtggtgaactcatattctttctaaaaaccctttaagagcttcttgttacctctaagaagttaaattttcaaaccagtttacttaggatttttaaatctctccttcatctggaccacactgactccttactacacaggtcaacatttataggctgtattcgaaccatgggaaatcacgtcttttctcaaatgagcttctgcacatatatccccctgcctgatatgtccatctccctgaatgattccaacctatcattctctagacccaatttaaggacactctccttggcaaaaccatctttggccattcctcattttccaatctgtgtacttaagtgtttattattgcatttacctcactgtgttgaagtaactaattttcatgtcttcctcttccattaaaataggaaattttgaagacaaggaccattactcatgttcatatagtaagcacttagggttatctggcaaggtgtccaattaaatatttgcagaatgaaatattaaatgattgagtgactgaaagaagcattagctcatttggaatcatattacatcattgattcacacacagtaagccaactatcattcacaacccttaagattttttctcattattgcccttataatatgtgctcctcaacctataagcacaatttgcttttggatttgtgtcatacttcacatttaatgtggtttttttctatttgcccaagccttctggcttgttccaaagcayttagtgttttgtcctctcatagtctytattacttatgtattctaactgatcaccagaagatactatttccacactacctacaccttgttgacttcttaaaacataggcaaaatactggaatgcattaatgcattgtaattcaggttagaaaacctagaattgagttctggcacctgtttccactcatcagtgggcatgtttttaattcagggaggcaacaaaatagacttaataagagcatcagttttgctggtcctaacagcaccttgtaggtgatgtgctgggagggagtctccctcacaaacccaccctctttttagtctaaagtttggaagaggcaatgacagtgaagtggctatgttgtctggggtagatacccaaggttcatcacctcatgccaggaaaatttaggatatggacacacatgaggggtgtaggagtggagatttaataggcaaaagaaagagaaaggaaaacagctctctctctattgagagagaggggactcctgagaggaaagaatgatcagggacagatgcatcagattttataatcaggtttgaggaaacagtgtctgatttacatagggctcacagattaattcaatcaggtatgacatcatatcatrtggggaaagctgacccctccaccctaatattattatgaaaatgggctttccagttgactggtgccatcttatctgctccttactgtacacgtggctgacaaagagaagggaagatggagccaccattttgaacatgattgtcacaatgtcagcatctatgtctgcagcttgatttttacaggctttcctttgttagaaaggaaaataatttggggctgcttttcaattagaggaaaaccttactgaagacttccatgccctcactatctgcctaagtaatttcttcttaactcctgtatcgttcctccctctggattggtaaccctaagtgctgttaggggtgttggatgacaaagstttctggctacttcctgctgaaaagggcattgtgtgaagaacagcagctagggctcstcctggggtaaatctaagggtccttggaagaaaggcatgttcatgcatggttctgtctacagcaccatttggagtttgattgctgtcagccattccagtgggttgtaaaactggtttacctccaccagatgttgctgaaatgtcaatatagaagtaacattccttttaggataagtggcattggatttgggtggctagagtaactttagtgttaaccttggctaaatctttcctgcaattattaatcctttcatgactaccatagaccatgtaagacatgcttaaactttccaacttgtcccaaacatccttctttttaaacaaccaactattctttttaggacaagtatttaccttccttataatcctttcatgacttccatgaaccatctacaacatgtttaraccttctgacttgtcctaaacatgcttcttttaaacaaccaactattgtctttaggacaagtatttatcatacaagatcctttcttacataaaatctctttcctttataaacttcttttcaaagccagggtgtgacatattaccaaacccaataaraagtttacagttcacaatctaaaacaaagatgataccagccccttcctaagatatacttccctcttacctgggaaccagaccaagaaactagccacaagattagaaaccatggcttaggagtcacacagctagaggctacaagattttgaccctctctaaactgctctcaagatcagtgcttaagatattttataaaccctgcccttgatggatcagcttgcctacccagatcgataaactggcttatccaggcacggtgttgaatgtgccacccatggttgcaggcgtgacctcggccatggaaccagaggaactaggtaattgggatttgtcacgctcacccatgcaactctagtgctctgcctgtgacttccctttgactatctagacttttgtgacctgcctggctcccccagccaaaaagaaatggatctcaggagagactacgtgacatttgcacttgggcaactgttacacttccctcctttataaaggaagtgtgctggtttgagctctataccctgccattatcacctgtgctaaagtgttcaccctccaagaatggttctggttaacttccaaacttaaaatccccttactaagtaagtaccattctaactggaggcagaataggtgccttaaaaaatgtaaggaccaaatggccatttacctactgatgggacagtattgagactaaaatttggtttcagaagatattttactcctaattgttgaagacagaattttcccattcaccaaagcagcataaagcctggtttttagtagaggggcacaaaaagggagaattgggaagctagggtgtttcagaaaaagaccaacaatctgcctcatggaaaggatccctattccactaggtggcactgttaaccttgaaacaccatgcggtttccagtccaagggcagagagagacctggaaatgccatgtggtctccaggccaagggcagagagagacctggaaatgccatgtgctctccagaccaagggcacagagtgacttggaagtgccatgtgccctccaggccaagggcagagagagacactcactgtgggtgggggggaccctctgttcctcaaaaatcacaagtacgccttcccttgagctatatgcctagttactatgacattgcctaatcttgccaaacaagattacttttgtaaaatttcccccacattgcatacacagagaggataggagacatggctgtctcagacaggaaaggaggaaactacaataggaaagttggagatcctgttgccaacaccccatcaggcagttggaggctggcgtcagttcagaagcctttggataaccccgggggttagccccagctggaaatcctcagttgctccagaacctcttccagccccacacgaaggctaagtcctccttgaaaggaagccggttcaaacacagccaacatgcccagtaaccaggattctccatgttctccccagtaatgatcgtatctgagtctttaagaacagcagcaacactaaccatatttttaactggctgacagatgcctgttattgatttgattttatttagttctaaaatggaggctgagagctccaaaatgaaaggatagagttggagtccactcctctatttaccatttcaatgaatgttgtaccttggtatcccagatgaggtccccaatatgaagcagctacattgtctggggtagacacctgggcttgtcatcttgtgccaggaaaatttaggacacagacatacacaagtggtttaggagtggggtttaatagacaaaagaaagagaaaggaagagaaaggaaactagctctctctttagtgaaaagaggggacttccaagagaaaagactggccagcagcagatgtgccagattttatagtcaggtttgaggaggtggtgtctgatttacataggctcacagattggttcgatcaggtatgatgtttacatagagcatggggaaagctggctgccccaccctaatcttattatgcaaatgggctttccagttgaccagtgccatcttgtctgctccttactgtacacttggatgacaaagagaagagaagatggagccaccatcttgaacatgattggcacaacttgccagcatctgtgtctgcagctggattttacaggctgcccttgttagaaaggaaaataatttggggatgctcttcattaaaagggaaaccttaatgaagacttccataccctcactatctacctaagaaatttcttcttaactcctatatcaacatactcatactactcatctgcttccgcagaacatcaagaacatatattttaattcaacaaaacatcttttttttatactttaagttctggggtacatgtgcacaatgtgcaggtttgttacatatgtatacatgtgccgtgttggtttgctgcacccattaactcgtcatttacattaggtatttctcctaatgctatccctcccccaaccccccaccccacgacaggccctggtgtgtgatgttcaacaaaatatcttaagatctactgtgcacctgttgttacaaagaagatgcttacaaaagcaacaaataccacctctgccttttgttttggtatctagctgcctcccaccccatcccaccccaaatacccaccgctttattcatgacactgctgtttccgctttctggcatctggaggctaacagcatgtgtaggggcttctcagaggtctccaggctgcagataagccatggttaccaaaataatcattgcaagattataccaataatgttagatgttgaaggcatttcagacataaaatgtactaccagatgagacataaaatgtactaccattctcatgaatgagaatgagttagaatagatagtatctaggaaaaacacttatctaaaagcattkggagggaattaaagaaaattggcacaggcagaatctagaagccatgtggtggagaaaagattttttctgacctaaaattgttttagtttgatccccatttgtttattacatcggaaakgttcatttgtccacacagtcctcataaataaccagaattgtaaagactgatgatagtggccatatatcaattttctctcatatatatacaatacttaatagttcatatgtctctttctaatttatcatctcatttaaacatcttgataaccttttgatgtgagtgccatcttcctcttttcaaacataggaagattcagtcttcttttaatgatagggaaactatgaactactagtatatgacaaagccagttctggaatgccattctttatgccaaccatgttcaatgtacttttcactgaaccatttccaattctactctcatgtttatacgagaatattcatcaaagtgaaaataaccctaggaggtctccaactttgttgccatgcccagtactgtggctgaaagatcctgcggaagtagtcctccaggataatttcagtccatgcagctgagtctctttagtgtctcaggatgaccgcctgtgtggccactatgctgatggatcaataatgaggcagagagacagaaagaccaggcacagaccacaccagagtaaatcaatcaaggtctgctcaattaaaaagtaaaaattaggtcagtataggcaggacacagcgaagaggttagccacattcttcaaggaagatttaagatttccatcctcaagtgcctcatcagtgaccatactgttgcagaaaacaatgtctgcataaagacacatcagactttttagaagcagaactgatcttctctaggcccagccttaaaacaggaacttttccaggtttatgatggaaactacttcacttgggccaagtgcacctcatcagtctgagttacacaacacaaaatatgaatacaaatcacagggcacagtacacttgaacttgggcacacttcccattcatcatcttcagcctttcaaggcaaatgccacaaaagtagaattaagataagtgatgcagatcttgctacccaatcatgaaaacagacacctgcaacatttcagcgttgtataacacatcagtccttcctacagagaggggttggttaatagatacaaaattcaactagataagaggagtatgtttagtgttctatagcactgcagggtgactataattgacaataatttactgtatgtttttaaatagctagaagagaggattttgagtgttcccaaagaaatgataaatatgtgaggtagtgaatatgctaattaacctgctttgatcattacacatagtacacatgtattgaaacatcgctctgtgccctataaatatgtacaattgttacacatcaattaaaaataaaattaaaaagaatcaagaaggttttgggatgcacaaaaggattttaaccaatgagaagttggggtaattcaaaagaacactgtctgctacaactaaaggactagatggggacaagaatggatgcagaaagactatttgggaggcaactgtaatggccagcttcatggatatgtggcctgtgcattcacatagggctctgcactcagaagggccttgctttgtttaatgccctgctttcaccatcttgaaattctctaaaaaaaaatttcaagaaacccctgcattttcattttacagtgggtccacaaattattgaaccagttctagctattgcactaatccacatgaaacagcagggtcaataggaggaatgaacaaccaggaaataatccacgtgtagagtcaaagccaaataacatttgtccaacatcacacgaccttcgtgaattcgtccatgtatccattcaatacacattacattgttttctgtgggtttttactaggccctgcaggttcatagatgaataaggcattatttttatcctttaggaccttaagggcaagcaattrtaagtaggtacacagaggagggcattgtagctactgaaaaataccactgagatctgaattgatagctagtcttcactgttcgctagctaattaagttaaattttttaacawctcagtcttggattttttttctagaatgggaataatagtatcttgattgttgatatgacaattaaagtaggcagaatatgtaaagtggttattagagtatggcataaaattagcacttacagtcattattatgacaacagaataaaagataaattcaagctgaatggtttattatgagtgtcatagaagcaattgggaactaataataaactaaaaattcggggtcaaatgtgctataatgaacatgctgaatttggtgcctgagmtatgagttctcatcctggctctgacacaaatgagctatgtgaccttgggaaaatgactactcctccgtgggcctcagtctctacctgtaaaataaaaggcttcaagggatattacattatgtgtggtgcacataatatgaactagaataaatctgctaagtgcacaaaaggtacttaattacttgaaattattttcataatttttagtaagtctgaagtagcttacgaaacartatgagagctatgcaatcctaaatttgtaaacatacttttttgtatggggtaaaaggaaatgacatttagttaactccaaaattttaaccattgtcttctctgggtggtaggcttaagggcaatttttatttttttatatgtgcatctttattagtttccaaactcactataattagcataaatatttctgtaatgaatarcactcaaatattaatttttgtgatacatcagataagatgatctctaaagattgttatagccctgaaaattacattatgctacatgggttttcacttaagaatgttcctttctattagcataaagagatgacagtattaactcagtgattttattaatacaaataaattagttcaacatgttcttggttttaagtccctggcaaccaatattaagcaaaacattataatacagtacagatttcagtcatttggctctctttggaagttctttaaggaatcattgaaactacaaaaataaaaactttctaatttcaaaccacagttctgatgctcctcagcctrgctgacttactgtgcatattctgcagtctgtgctcaggctgttttttccatctgcaatacagtgaatgactcaaaaattgttcataatttttactttttcttctgagttttgtctagtcatctttctatttttggtcaatcactgctttcaaaataattcaagaggtatttgtgttttctcttgaaaatgtgtttcaaatgataaatttctgggcttaaagtcttctgtatggcaaagcaaaggatatccaaagtgccrggcagagcagggatttgggaagaagtcacaaggaggagctgaacgcaggacatgctcattcaaactaagcaatgtgaacaagtgactttttaaagctccaccaccatgagcaagatgatgtgtcaggtgcttcacagggtggcaagggggaaatgtgggccaggcactgtgccaagcacataaccatgattaactmatttaatcctcacaattatagaggtatacactattaaatacattcaactgaggctcagagatgttaartgacctttccaaggtcaaacaactggtcagtagaaaagctgacattggaacctggatcttcacgagtccaaacctcatgtctttaatcttttttcaggggtccacaaacttcagaggctagagaattgagtgacatgaaagaataaaaggatggtactggaatgtgtctatgtcctcaaaataagcctgatggtgatggtggatggctggawggatggatggatggatggatggatggatggatggatggatggatggatggdttcatggattcatggattcatggattcatgaatggatggatgactcctcagccctaaaatgcaggatgacaatgtgtggctcacagtccagccctcttcactttagcactcacagtggacagctctgttagcactctctcctcctgagtctacatatggcttcaaacatgatatatgacatttattttttatccccatactggagacctataaaccacctagctaagcaaaatagatgtcctgtacctagagaacccatcccactttttccttgtgaagycttatcttttaggattcagctcttcagccttccctgaacacccagcctgggttgctttttttcccgtgtattcctatggcaacaaggatgtatcctttccacggagtttatcatattataaaattatctgtgtatttatttctcttacttaatgtttcaaggacaaagacaacatgccttcttcatctctatatcccagaatattatgcctggcacacagtagatgctcaataattatgtgcttctctgggtctatagaagcataataattagtatcatctattgttaacatcttttctccaaggtattcacagatttgactcttgtcccagcccacagagttatttggtcctcttaatcctcatatgcaaaatacctccctaagaatgtacattttcactcctaagtctaagtccctgtccaatcctgatgagttgaactgtgcctggcccagtataagctgggaaggtttttttagcataaagctagattccatcttcacatggattttgataggaaagtataaaggctgtttaaaatctataaaatgtgttctgcacatagaaaacattattattaatgtgagtgtaccatctagacactagactctagaatctctttcaccatatgtgttctgggtcacctcatacccttgggggtcaattgatttttgaattagscaatgtgcaaacccttagagcagccactatcacataataggtgctgaaaagatrtgtgtttttttctwtttataccactcctttctgaacctcagttttctcataggtctccttgaagtccccccatggttatcagttccttttttcttccaacagagatttcctggggaccaaggaggtatcactgctactgatggccatgttcctcctggctgtgttctaccatggacagcaggtaatctaacatttcgctctgactgctctgttacctgacatttcttgttaccatcaaactggcctctgctgctctttgcagcaaataacttttagctgcctgtggcaagttgtggttcttaaagaatcaattcctaataaagaccacctaatgaaaaacaaagctggagaagatctggtaaacaatgtggttttaatgacctttggatacatctctttcaaaatatcatcctagtgaaagagctttcaatttctgcctaagacaaactgggatccctcccaattctgttgcctggatgaaattattactactacaaaagttgtgtgctatattaggtaaacatgtgggttcagctgagcctggattctaatcacagttcttactctcagcagtgtatgattttgggcaagttacttatctccatgagcctcagtttcctcaactctaaaataaattagtaatacctaaatagggctgtcttgaggaagcgttgcagattactgtgtgtagaattttgtgcactgacttgcattgtttataataaagacttcrttacagatctgtcctaattagataaaatgcctgccatatggattatgctttccatgagcccctactctttaccagaatctggagtgggcactgtgggcagaactgtacaaaatcccagctctggtccagtctcctggagtagagctgaccccaaataatgcaaacatgttatgtgtggaacagacttagctagggacttcgagaaagaaaattattcttcataggaacatctaggcagggttctcaaagaccagtaggtcttctccaggtgaactccaacccatgaacgttcgtcgcttggggagattctcaccccctggtagaaatcaggcactgcctccctcactacccttctctggatcttggtccatctttctgtggtctgtgtgtacttcaaaaaccataaccagaaaaggaggaaagcacagcaaggagactgtcagccagaccagaaatagaagcacattgctgggaaatcaccatggaaatggaggtaacgaaccctgagaaaatagggatgaaacagcccaaaaccccaagaacacagagacacatawttaaagttatttgtaataaaggggattgtacagtgtagtcaagaaaaaaatagataatattaaaacttggcaagtgaaggaaatgaataaagaattaatatttattgagtccctactatgtgcctagcactttctctctattctcatttaatcctatcaacaacctggaatggaagttattattactcctgttttatggacgatgaaagtaaggctattcagctagtaagtaggaggaccagaattcaaatcctgatctgtcttcaaagcctcccctttctacttcactgggctgatcagagcagaacaaagatgctgtctgcatacgaacacagtgacccaggacactgcatcttgcaatatgctttgacttgttttcccattttggctaaaattatgatgaaacactaggccaaatgtcaaagtctagccatttctagaattcctgtttttaggtctttccagctatctgtgaggactggggtcttgtcttctgctacttgacagctttcatttctaggggagagtgccttagtctgacacacaaatgacaatccatttgagaactacaaaaacagatttagacaaggccatcaccctatagacaaacatatgctcactcaattacacaggttttaaattgacaagtgagaaatccctggaaatagctgagagaacaagttctgggtaagggtcgtcattccataaaaaggagaatggttctgtctcttctgtcaccttagggaattactttgtgccctgtcagtgccttcctcaaatggtaccctaataacattcagatttgatttatcctgtgctccatttgtcctgggaaagcagataacctaattgcattaagattataggtaaagtacgggtatgtaagtattcagtgagggtctgagtgactgggtttaagtgacatctgatatttttcccttttatttttaactttcaaaaggctttgaaattatataaccacatctcatcactatagcagttacaagtacaggctttggaattgggcagatagtattaaaaccccaactctgccacttagtagctatgtgactttcaacaatttacttaactttctgattttcagtttcctcacctgtaaaatgggtatgataataacaagttctacttcatcgggttgttagagtgttatatgagaatataattgtaatatacttatcccagtggctcgcacatataaattttcaaaattgatagctattaatattttactttaaaaataagctgatgacaaaaacaaggcaggtattgttagccatctggtcctaagacaagaacagagattgaagtcccctgaggtcacaaagcctgtaagaaacgccagactggagcgggaatccaaatgctcaarctcctagttccattctgtttccttcacatgccactgcctccctgtgataggggcggctttctgcagggttgtatcacttcaagtgtcttctatctgcagcatcgttttgggtcctgttaatctccgatcaagcctgcccactcctgggcttgctccctgcttctactggttttcccttgtgactcagaggccctctatttttaataggggctaaataatgcccactgatgcctggtacgcagaagcgtctggtgggggcatgtgtaattaaacatctccagagggacggaggtggttatgtaactgaataattggaaatttttatcttgcacatatgtggaaatgacatgccaaacacttcctcctctgaggcaggtgaacattctcaacattgaacagagacagcaaacaactgggtgcctcccacctggtgcctgattcactggtagccctggaggtttgggctttgcctgggamtcttcggttttagcagaggaagccacgcctccacaaggagaaagagaataatgaggtcctgtctccagtaacttccaggtgtgataatggcaggcacctgagattgtgtggctcagaaggaaagactcaagccttggaaccaaatattcttgcttgagtcctagcaattccacttcaagaataggtaaccttgagagactcaaccttccagggctgtcatttcttacagtttattgattgcattctctaaggcatttaagaaattcccctgtcctttgtttttgttttgttttgtttgtactgtatttctgtccagaagcttggtgagattcaggtttaatgatttctgcaaaacatttaattggttggttttatagactacaattagggggtgcataatgtctccttatctttttgtgatgttagcagctgcttatgataatcgcctatattcacttattttatacagtgatatgctaatcctatcagttctccataatttattagctggaatacgttactaaagagaaccatctcctcactatttgttacctggaagtacaattcataaagcaaagataaatgctgaattttttccctataagtttgtttaagtttccccataagttttttccctagcatcattcagaggtgaccatgaggttctggtttttaagtgtcattttgaatttacacattttaccatattctctgtgtttcaattcattgcaattattagtcttattaagctaaacgtgtcacatctttgactagtgggagttcattcaagttggcttttgcatcattttgacataaccctggtagtctctgatagactcctggtttcccgtattaaaaaatcttccaataaagtcatttacttaaaacaagacataattaaaagtacctaaaatttgggcacctctgaaaagaatgggaatttttttgtaggaactgatatttagaaaccacaatctggacactgggagttattactactaagttttcattgtttctagaacttgatttcagtgggcagagctagaaaatctatacatcatgagttcmcagtgtgatacttccacttcatartgaggaccacaagcttttgacttaacttcatcaatcttrtatctgcagctcctttttctcttccccaaaattccagttttaatgacaccaacacagttactcatttactttatcttgtgattyactataatagtctaagtatattaatacaattgttaccacctataatgtgattattgtaaacagttttgacattcttgttgagctctttttatccttagggtatttccctctggcagcatgtcatcaaattattgtgcaaaaggacatctgatatagttcctctctgtgtaggttcatttgttggtttgtctgcttggttatttgtttttacagagttttttgataatagatttagtttaataagtaaaatattggaattattctaaagttatttacttaaaacaagacataattaaagaaatttaaattctawccctattttcccacaccattcccttcctttgtcatttcatagattaaaatataaaccattttataaaatgtaaaatggtttatatgttaatgttttaataaattaattaagaaggccagtcacagtggctcatgcctgtaatcccagcactttgggaggcagaggcaggtggatcacgaggtcaggagatcaagaccatcctggctaacacggtgaaaccctgtctctactaaaaatacaaaaaattagctgggcgtggtggcaggcacctgtgatcccagctactcggggggctgaggcaggagaatggggtgaacccgaggggcggagcttgcagtgagctgagatagtgccactgcactccagcctgggcgacagagcgagactctgtctcaaaaaaaaaaaaaaaaaaagaaaaaaaaattaattaagaaatatgtgtgtgtgcatgcatgtggataaagagatcgatctttcttagataaatggtagcatactatatacasttttctcctcttggagaccagttcctcaaagtatggagagatagtcttcatttctttttaatagctgcatyatgttcaatgatatttctgtactaaagtttactcagccaacaaaatgaacatttggtttgtttccagcctttgttattaaaaattctgctgaatggataaccttttgcatatggtcttttcatacttttgccatccactgagactttaaaawttttttaaaaagaaaagaagctatctgaactgtctaagcccttgaattcagggcagctcaccatgtgtttascagggcagcatactgttcatgtcaacagttaaagactgaaataatgacatacgcagaactgcagtaaaaacgggctgtgagatcctttggaaaggacactgtgcaccttctcatgagaggggaggctaggacaagagggaaccaatgtgtattgagtgcctactatgtgccatgtgtttatctataacttcctataatgcctattccgcccctgcctggtcactgatgttcacatcaatttcagagatgaggaaactgagatgaagtaacttktccagggttaaagtgtgtaaatgtggaactagaactctaagctatatctgtctagcaactaaatctgtaatcctttcactaatgagttcattcatttattctatattacctagtggttaacaattcagattctatattctgatttttgaatcaagttcaaatcctggcttccactaactcatgtgtgatcttagtcaagttattaattcatgtttgctttgattttcttatctgtaaaataagaaatgacaataataccttcctattagggctattacatggattaaaggatttaatatrtgtatattgtttaaaaacattcctggtatatgataagcaccatgtaagtgttagctagttttattatgataacttatttaatragccatcaaatattaagtgcctgccctgtgccaaacstgttactaygtggtaagtgtattcgtatctccacctgtcgtacataacaatatgccatagactgagtgtatttaacaacagaaatttatcttctcatggttctggaggctgagaagtccaaggtcaagatctggaagggtttgttttctgatgagggctcttatytggcttgcagatggctggctacctgcttgctgtatcccaacctggcctttttttagtgtgtgcatgtggagagagaaagagcgagtgttctcatgtctcttcctacaagggcagtaatctcatcctgagggatacaccagcatgacctcatcaaccctaattacatcccaaagtttccatctctaaatgccatcacattgggggttagggctccaatatatgaatttgagagggacacagacattcagtctgtaacagtaaggatgtaaagtcgaacagatagaagcacctctgacsatatgatatrgtttggctgtgttcccacccaaatctcaccctgaattataataatccccatatgtcaargatgggtccaggtggagataactgagccatgggggcagtttcccccatactgttctcatggtagtgaatgactttcatgagatctgatggttttataaatgggagytcccctgcacaagctctcacttgcctgctgccatgtaagaggttcctttgctcttccttcatcttccaccatgattgtgaggcctcctcagccatgtggaactagaagtccattaaacatctttcctttataaattatccagtcttgggtgtattttgattagcaccacgagaatggactaatacaccatacaacactgacagtctagtagaggacaccaacattatcaggtaatcacacaaacaagtatgaaatyacagggggcaataatgctgtgaaaggcaggcgcacatccctgtgaaacctaatcattctctgatcacttggcttccaanaaaatgcctcccaaaatattcagatcaggctctgtttcatttgtgaagagttccagagaagcctttcctgcctcccagttgtctgtgcctgaagcctacacctcagaagtttacctcattctcctctttctctcacatgtactgcagctggagtacacagcccgcctggacttcctttggcgagtacaggccaaagaggagatcaatgagatgaaggagctgagggaacacaatgagaacatgctccggaatatcttacccagccatgtggcccgccatttcctagagaaggaccgagacaatgaggtgagccaggggctggtctagccagtgagaaagggtggtggtgggtgatgtgcagttgttcacattgatcccaaactctgggagaatttcactgtcatcatgtgagtgcatgagaatggagaaactcctaacactatgaaatttacacatggcctcccaacctcaggcacctcatctacaagatggatataataaggtctccattgaaagactacattggaattttaaagttgtatgtgcatatgcatgtgtgtgtgtatatatatgtatatatatgtatgtgtatgtacgtatgtatgtatatatacacaacaatttcacttctggttatatacccaaaataattgaaaaaagggtctcaaagacatatttgtatatctagaagcattatttacaatagtcaaaaagttgaagcagccccaagggtccaytgatggacgaatagataaacaaaatgtgatatatacataaagtggaatattattcaggctttaaaaagaagggaattctcacacatgctacagcaatggatgaattttgaatacattacgctaagtaaaatgggccattcgcaaaaamtaaatactatattattccacttatataaggtacctagagtggtcaaattcatagagatgaaaagtagaatggtggttgccaagggctggagggaggggagaattggagttattgtttcatgagtgcaaagaatttcagttttgcaagatcacaagagttccagagatagatggtkaagatggttgcacaacaatgtgactatacttaatgccactaaactatacacttaaaaatggtcaagatggccgggcrcagtggctcacgcctataatctcagcactttgggaggctcaggcgggtggaccatgaggtcaggagttgaagaccagcctggccaagatggtgaaaccccgtctctactaaaaattacaaaaattagccaagcgtgggggcaggcgcctgtaatcccagctacttgggaggctgaggcaggagtatcgtttgaacctggggggcagaggttgcagtgagttgagattgtgccactgcactccagcctgggcgacagactgagaatccatctcaaaaaaaaaaaaaaagatcaagatggtaaattgtatattatatgcattttaccacaattaaaaataataaaatatatgcatgtatatatacataaatgtatgtatgcatatatgtgtgatacatgtgtgtatatttatatatcaatatctatacacatatatgcacatatacatacatatgtgtgtatatatcttcttagcccattgcctagcatgtagcaaatgctcattaatgttctttttacttaaaactgttttttcttattacattatgaaggcagtctagaagtctgaaatcaaggtgctgggagtctcatgccctctccatagggtctgggggagaawctctccttggcttttccagcttctgttaggcccaggagtttcttggctgtggccacttggctctaatttctctctccattttcacacagcccttcttaaaaggacaagtgtactctccttttaacatcaccagtcatagatttagggctcaccctaattgagtatgacctcatcttaattacacctgcaaagaccctatttccaaatagtaccatgttggacatgactgttgaggggagcatgagtgttggtggcaggaggcactaggcactattcggaccactagaaggaggaagggttgtatggtgagagctgtgaagggaaaccctagacagagcctaatggtcaagctccatgggcgatggtcatttccacatacaatgggagcctttggaagttttaagtgtaacctagtcaattggctactgatagagagtggataggaggatcatgcaacamaaagccaggcaggagactctaaaagggcccaggcaagaccctggtgatgaggcctaggatggtggcagtggagatggagagaagaagatgaattacagacacctttaggayatagaatcaatagttcttgataatggagcagatgtgggaggtgagaaatgacaaaatcaaatgatttggttccccctctaaccttcaagggaaagtaactcaagagggaactgaaggtgtctttgaaagcccaaagtggcattattatgtgaatgggtttggtcttactctgtgagactcccaagggaaggtctagaaccatggactggcccacaggggacatctttgggtttcgtgttaggaggagccttacaaggacagagccatcaggccatctcatcctcctaacacagtkagatccacaaagcagggactacatcacccttggtcaccactgtgcctggctgtggcccctgctcttaaaatgcctgtggatgaactggagtagtgggctcccttgctgaggcatttaacttgggaaagctaaccccttgctgaggatgctacaaaggcaatatggattgtctgagaggcagggataataccgctcttccaggactakattttcagactgagctaaacaggaaatgaaaaacccttaggacaagaattacgaactctaagaccctgagacaaatctgaccaatgagccagttggcttggacagtgggttagttgattggtttatagttaatttatgaatggctcttcagtttacccatctgtaccctgccatttatgttacctgtagcgcccctaaaagcattggggtttgtgatccttgccttaggaccatagagggcagagctaggagagaatgatgaggtccatttttcatctgagccactgaagaaaaactagtggaagacaagccaagggaatgagtaatcagccactggaataatcagatcttgatgtactcaggtctttgagagtctcttgggtgcggagactccaccctcctcaacagatggagttccctgaaactgggctcaggcctggtttcctcaaggctccctaaggtcagtgtctttgttgcaagagcttcttgatgaagccatggaagcagagagaatatcagtgtgtatcaaccatgaccaccagatggagacaataaaaccccacatgtaaaatccaaagagaaatgagaaaaaaaaacagctttttaatcaagacaccgaaacagtgaggcacataggaccagtggagaagagcaaggacatactggttycatcctgaaaggaaggaaaccaaccagagacgcatgctgagactccaggtcatcagctgtcattcaggccaaagcaaaataaaggactgcttcagcattaatcgcatgtataagacatcttgtcaggattatttgagattttataaatatttaaacagttcacactggactaggattaaacaccaatcatggttacattgcctagagaattttcacattaggataaaacatcatttactgaacacctactccatgccagatactgaaataggcaattgagaaaattatctttcattctatttacaaccttgagagttccatcagcctcatagtattgatgaggaaactggggccctgaaaggtgcagggtatgccctactttctttatgcaaagccacaaggggagtccagtccctcagattgctttcttctgtgcccctctcccccttacaatgctgctacccataccacctctggagtatggcaagactagtgtgtgtgtgtgtgtgtgtgtgtgtgtgtgtgtgtgtgtagaaaaagagagaaagacagagtcatacaatatgtgaaagggtgacagggaaggggcaggactgtagtggccggcaagaactcccagtttcattctctgttaccgtaagaggcaaaggcatttttagtttctcctcttgctacagatctgaactgtgatacaaatttctgaacatctgactggggacatctgtgagtttcacggagccacaatagcacccaaagcaccaccttttcctcttatgccaggtatctcccaggtgtatccctgaggtggcagtgccttcatggctgatcttcagctgacctagaagagttgtgtgatgcacaaagcctccaactgacttgtttgcatcaatgtgggcctcacactttagaaaataattccacagaccgcactcaaagaggaaccgaatgtacagcctccagctggcaaagccagataacttcttagttgtaacttttgtgtatgtccctggccacagcagccagggrtatgctgaaagccatcagtgccatcattgctgcaagctcagactctcttttctctccctccttggattctaaccccttttgaggtgttccaaataaggccatgtgacctagtgggaaaatcccaacgtattaagccagaaggacatgtattcaaatcccagctcttccacttactagygtgtgatttggagcaagttagttaagttctctgagcctcagtttcttcaactgtaatatgattctaattcttaccctcctaggacccagatgttaatcagtcaaggaggtggaggaaaagaattccagacagacaggcccaaatggccaaaggcataaaaatgagatactataggatatttgctgagaaggactggggggrctacaagcacccaaatattttaagggaaagaacaggccagagcaaaggtatcataagtacaaagagacaagtcttgaagagcattgaagtagcttggatctgattcaatgtgtaataggaggtaggaactattatccccattttctagatgaagaaactgaggctcagggaaggaaagaaatttacccatggtcacaaagctagtgagtastgagctcaaatccaaacccaggtatgcgtaacaccaaagccagtgttctttcccctccacctcactgtaagtacatgcagagaagggaaactgtgacaaaggatgactcaaaccatccaaacacaggcggtggacagggcctcacacccagaagcattctgtccaaggcagtgttacccacaccaacattctggcagcttctgctattctgctgtgcttttggcttagaatagcactcacttcctctggtcaggaacattcttgcagataaagccagctggaggtccaggcctgagtatctcatcaatgtcaagcaggctagctctgagtcccgggaaacccrctggctcatcatggctttatgarttgttgaaaaracactagcaagggcagctgtcccaggtgctggagagtccacacagcataaatcccatctctgtcactaactagctgtgtgacctacgccaggttacccaactctttggagtccatttcctcatctgattaataggggaaataataccgaccttgctgaattggggtcagagctaaatcggataacaacacattaagtccccaatgcagcccrgtgccaggcagcttcattatagaaaggmcgtgtgtaggtgcattcaaaaccccagtgctgtgggtttagttctggttcctcctttcactacctttatgaccaatggcaaatgataataaccctttctggacctcattttcctcatgccccttgttgtgctacaaagggatcataaccatactctgcatcttcatctgattcattacatttacatgcgttatcaagcctaaagcacttacatggtgcttgacatattttaaacgcacactggttgttggctattgttttttatatatgtgagtcattgctattttttctactccttcccagtcacagccccatcccctatcccttcattcaaccattccttcctcaagtatttattgagggccaaccatgtgccaggtgctattctaaataccggggttaaaacagtgaaaaaacaacaaaggccttgatgctctgaaacatgtgtttctgtgggaagacaagacagtgaagcaaataaataaatatataacatagtgtcagagaatgatgaatttgatgaggatagaagtagctgaataatggaataaagtgttgaaagggtatttacaatggtatcttagtttgtttgtgctgttataaccaaatacttgatactggccaattttttttttttttttttttttttttttttttttttttgagacggagtctcgctctgtcrcccaggctggagtgcagtggcgggatctcggctcactgcaagctccgcctcccgggttcacgccattytcctgcctcagcctcccaagtagctgggactacaggcgcccgccactacgcccggctaattttttgtatttttagtagagacagggtttcaccgttttagccgggatggtctcgatctcctgacctcgtgatccgcccgcctcggcctcccaaagtgctgggattacaggcatgagccaccgcgcccggcgatactggccaatttttaaagaacagaaatgtctttcctcccaggtctggagaatggaaagtccaagatcaaagtgccagcaggtttcatgtctggtgtgggcccttgtttctgcttccacgatggcactttaaactctgtgcccccacatggtgtaagagccagaaagaagaaatccactccctcataccctttaacaagggccttaatgctattcatgagagctccacctttatcacttagtcacctcctaaagccctcacctcttaatactatcccactggcagtgaagtttcaacatatgaatttgggggacacattcagaaaagagcaagggtcatggaagctctctctaaggaggtgacatttgatcagagacctgaatgacatgaaaggatgctaataaggtttgcaagtctcagacatagtttctcccatgctgagaggtggcttaacttggtataagcaacgcaggacttggagttgcttgagcaggtgaaggaccagactatagttccccaggcagagagkacgtcmgtcctcatactgacatatgcaggtgtgcgacggagcgcatgcacatgttcaaaatcctctactaagtccataccttcgaccaaccagaggaagatcacaataaaccaataatagcttttctatattcatcaattcctccccagtttacaaagtgtttttatatttttgaagcccaaaatatcaagaaacagatggcacactcaaggctgttgactggagtgagttgagtgaagggactgtctyggaaggtgtatgtaggttgtccagagctcctccgtgtgcccctcaaaatcccttcacctcttctctctgctcttcctgaggggtcacgggtgagagggctcatctacatgggttacatctgtgacctgctmggccctcaggcacccaggtgagggatcatcaatggccggccctgggtaagagatgaggggaagtgaggaatgtgaggtgaggatgtttattcccttgcgattgcctgaggctggctatgtcacttcacagaaattaatatctcctcccaaggccactgctgtgctgcctccaatgtcaaacgagctcactccttttgggctcttctcatccctttgagcctagagggatgactgctctcccaccactagccttgggtttctgggagatttcttagggtttccctacttcctgccctcatctttctaattaagccctttatcagytaacccttcctgaatcatcttgatctgaatgtgtgccctcttttctgctgggtctctaattgaagcaatagggataaggaggagatgaatattccactgtgctcagcaattgtgggaagctgtgatggctcccaggctgaaagggacaaggagaaaaagcagttactggaaccagcgtgagtagccactgccagtcatggcacagaggagcaggcagacaactggagtggagcatctcagggccaccaagggcaaaagcagagcaagagctggcactgtcatcaactgctgagggacctgtggtcagaggagtcacctcacttgcccagagtcatgtgcccacagctgtgggggtcgagcgctcctctcttcccacgttcctgccttcaccagctgaggaggaaatccctctaacaccgtccaccctgtggggaaatgccggggagggagtctctccctctcttatggtgctttaccccaycagactggggaaagacagggtcactggacctcgagacaattgtggggcccgggtgctaaagacccacaaagacctcaatctgtcttgtatcctcatggacctgtttgtgcccaaggtgaacccaccttctcctcacatrtggcaagccacataacacaggtttccctttctgccccacaagaagctaaagacccaycattctccaggctccctgccagccactgaatagacaaattagctcagtcccactctgtctcacaggaaggagctaaaggttcccatttatgcctcagatccaagacacattgtccaatccatccttatctgagagtctgtgttgggggkttggtcttcaactgactgtcagacccctgtagccactccctccatcagttagcatcttatggaaaggaggggtgagtcccagcccaccctattcccacttctccaacctccagyaggrtaccacagaatcaagatctgaactcaggtcatatttcttcaagctctttcttacccctccactgtgaaacgaccacccaatcagatggacaaacctaaaccagttttcagtttccatgtcacttattcctgcttgtcattattattattactgctgttgttgttgctataattatagttattattagcagtacaaatttcagctctacgtcataacaactatggggctcgggtaaagtatttaatctctgtatcccccagtttccccatagatgaaataagggtcttacttgtatctgtctcatggggacatggtaaacattaaatgagatgatgtatgtgcaatcttttgcattgtgcttggcacatagtaagtgctcaaaaaagtagctaatattattatcacatttttatttaagcaatcagaatatttcaaatgatggaaagactgagaaataaaactaaggaaaagggcatgaggctgggggcagtagctcatgcctataatcccaacactttgggaggcctaggtgggtagatcgctggaggccaggagttcaagaccagcctggccaatgtgatgaaaccccatctctactaaaaatacaaaaattagcctggtatgatggcaggcgcctgtaaccccagctactcagggggttgagacatgagaatcacttgaacccaggaggtggaggttgcagtgagcatagatcctgccactgcactccagcctgggcaatagagtgagactctgtctcaaaaaacaaaaacaaaagagtgtgagaggagctggcattcattagaatattcagggagacaaacaatcgttaagacacccctggctgcctgccattttataccatggagrcatttacatcacagggcataaaccaaagtgggaagggatctggactgcataattacacaatgaattttagagggtaggatcttctcttttttctctatttctaagcagaaaataaaaatataggcataatggactgaattatgtctcccgaaaatttatatgttgaagtcctaaccccaaggatctcaaaatgtaactgtatttagagacagcatctttaaagaggtaattaagttaaactgaggtcattagggggacctaacccaacatgactggtgccctaatagaaagaggagactagaacctaagggaagaccaagtgaagacacagggaagacagcatctgyaaccatggggaaagccctctgacaacaccaacctgccaacaccttgaacttagacttccagcctctccaattgtgagaaaactaacatctgttgtttaagccacagagtctatggtcctttattacaacagccctagcaaacraatactataggtaatacagtaaacagagactttcccaccaaaccacagccattaggaggatgcacatttacttaagcaggatctctgactcctgctgcacagtcaggctccttcgtggcatcaccatattgttcaaagccaaggaaaacagaaatccacctttgaaagccatttacctttgctctgctccctgactgctatctgcactctttctaccctgcccagccctacctagccagtcatcagctgcctgtgctcttttggataaggactaaagaaggcatcagtttagattaatccatgcttaaagttcaagagaaattgatgatgaatcagtgacaccatctttctctgacctagggcatgcatgtggaggaggcacactcacatgtgtagtgcagggaaaggccttgggagtcctctgatcctctcttccactactagctgtgtgatccaaaacaatgacttaactcctctctgtctcatttcctgtatcagtaaagtgggaataattatcatatgacttcatagaattattgcaaggattaaatcactgaattcatatgaaagcaatttrtaaggtttcatgtttcctacgaaggtcaggaagtcattaatcaaccaacagttttgagtatttaccttggaccagactgtctagggtgtgcattatataggggcatctaaaaactactaatcgcatgatacataattggagtgcaataagatgaatggcatgtggtttttgccctcatggaatccacacttgaaggaagaaatggatgttaagacagtaatgcaggtggcaagggctayactgtagagtttttgaggtcactgcaaagcaccaagtgcagcctctaaaccccctctgtgacttgtggaagtcgtggtctctaaatggttagcggaggcagaaaacaagagttagcctggtaaaggaagctaactgcagggaaggaagaacatttcccacccagggacagacggtaggaataaaagcatttaagtgtgaaatagaacagggtttgtgtctttgtttgggttcttccagaagcaaaccttgagacaaggatttgaatgcaagtaatttactcagcggtggtcccagtaaacacaagtagcttggaaaatgaaaaggaaggcaaccgataaatgatgcatcatccrattagttacctctgtgggcgactggagcttaatccggctgggaaattcagggaaatggtgtgagagcatgcctcaaagttatcaggcccaaggggcgagggagccgggactctccagcagttcccactggcattggtcaagtgctgcttctgaggggtgttaatttcctggcacctcccaaggctgcgtgtcacttgggcagagtgccctctagtggccagacaaaaacaccatctagcggagaagaaacacaagggttgacacttgaacactgggtgagaggatgcaggcagagcacctacagcatcagacaccacatgcacacagaagtacaaatgcttccgtgttctggagcrcatatccaactggggagttgcagacaataaagctgaagagataggtggaggcaggggcatgcatatatgtcatgcttcagtgtgtgagctttatcctgagggcaatggtgagccattggagggatttaagatagggagaggcatggtcaatagtgtatctttaatagatcactctggctgctgtgtgaaggatgcctttgaatggaacaagactggagtcaggaaacccagtagaaggctctcattttagtgatcaagaaggaaaatgggaagagcccgatttttaaaaacacacacacagtggtaggagcaaatatgtttagaagacaaaaacaagcccagcagaacttgatgatttattgaagatggatacaatggggaaggagtcaggatgactctaagggtctctcattttgatgatttggcaatgctggtgccaccaagtgaattagagagcaatgcagtagacacaggcttagttggagagaagatgcactcagtttatggaatttgtgattggaggagggtgagggcaaccaagcatgagacatggtagcttgaagcccaagaaggataactaaccttaacacaggaatttagaaaccgtcagcacatgggtattgaaacgagatggaccaggtaagtgtgtaaagttgagccattcagtgggccaaggacagaaccatagcaatcaccaacatttaaggtgtaagagaagcaaaaaaaaaaaaaaaaaaaaaaaggcattctcaaaggggccaggcatgagaaaagcaaaggacatcactaaagcataaaaagtcaagagaatcaagatcttggggtgatcaataaaaacaccaatctgcaggtgtccagcaggatataaacttacatgtgtgcattgatttttccactttgactgcaggctagactgttcttagttcatttcattccagtctgagatgccagtgggcattaagagcrtgggaataggcagtgaaggtaactagtttgagaagtttggaaacaaggaggaagagaacctagttgatagccacaagtgtctgcaggatccagggcactttgttctttttcttagaagagactcttagaagatgaggaggagcagggagaggaggctaggagaaagaaatgrgaaagaaaaggatcactgaaaaagtaaattgctgaagaagttataaaatgatcaggtagaagtattgaccttcagcaagagaaggaaagacagacacatcatcatctggagttgaagtgaaagagragaaaatgaataacaggcaagtctatgaggattggaacagaggtaagtcaccaccaagagccaccaccatgttctcaatgaartagaaaggtaagatcatccactgagagaaatagagtagagggttaagtggagatctgaaggtttggactagccattgaggagaaaagaaaaggaagcttaccaagaatgaatgaactggcagtcagaactcaggccccagctgaggctggagaccatgaattttcagtcatcacattccatatggtgatgatgctgtgactgkggtgcaatggactgaatattcatgatcctccagaattcctatgttgaaaccctaactcacaaggtgatggtattaggaggtgggaaatttgggaggtgattagatcatgaaggtaaaacccctactggatgggattagtgccctcattttaaaaggccccaaagatttgcyttgcttcttccaccacttgaggacacagtgagaaatcaacatctctgaaccagaaagtgagtcctcaccagacatcatatctgccagtaccttgatcttggacttcttagcctccagaactgtgagaaataaatttctgttgtttataagccactcagtctaaggtattttgttatagcagcccacatggactaaaacacactgttgacataacgatatccaagcctcattttctgtctctctgtgggtgactgtgcacgtgtgtacmcacatgtgtgcacaggaagcatcactgcagaaccgacctctgatgaccatttctggtgccctctgtgtgtctctgtccaggagctgtattctcaatcctatgatgctgttggggtgatgtttgcctccatcccaggatttgcrgacttttactctcagactgaaatgaataaccagggagtggaatgcctgcgcttgctcaatgagatcattgctgacttcgatgaggtaaatctaagcctgagacatttacaatcacaaatkggcatcgttgtcaaagcgttgtgttattcattgtaggaattacttattttttttttttgcacttaacggaattccagcctgcattataaacacaaacatgtattatctgatttaattatcacaattatcacctgagttaaatgctattatttccctatttgggggatcaggaatataaggctcagggaggctaagtaacataacccagtgtcacacagctggcagatggcaaaggcaggacttgactagaggcctctatgaggccaatattactcaagcactgacaccacagaggctggacactgaagcaggcattgctccatcttctcaaagtgtcaaagataaaactgtccatttgcatttggtcagagaactaattgcaagtacaaacatactacagatagcggtttcttcctccaggctccatgagtctagtgaacacattctgtggggggaaatgctcacgctgcacttcagttccattcataaacttgacacaagtgggccttctactcccccattccccatcttgaaggacaccagtgtccatccagttacttaagcctgagctgggaagcaagtgattcactgagaaaatgctayggaataagccaaatccctgcctaactccagagggaactcaggcacataaatggtacaactgtctcacactgaggcagggggccaggcttttggatacccatattggtcagtcattattggtcatgggctgccctggtaggggtacctagcctcccaggcatttccagcaagggagttctcatgaggccaagcaaattctccaaaaggaggtgcagtaatgcattgtcagcagccagcactcatggcattttggaggatggccccacaaaggggcttggggcgggaaaaaaaaacaactactacatcactctaaacagcatcctgtccctccatccctacattcaatccagcttctgagtccagtgaagtccttctttccattgtatatatttatggtgcaaaatgtgatgttttgatatatgtgtacatcgtggaatgattaaattaagctaattaacaaatccatcacctcacatcttacaacgtttttgtgccagaaatatttaagatctactctcttggcaattttcaagtatgcaatacattattattcactatagtcactatgctgtgcaatagatctccagaaagtactcctcttgtctaactaaaactttataccctttaactaatatctccctcttcccaccccaccccccaggttctgaaaaccaccattccactatttgcttctgagtttsacgtttttagattccacgtataagtgatgtcatatgtacttgtttttctgtgcctggggtatttcacttagcatcatatcctccagacccatccatgttgttgcaaatgacaggtcttccttctttttgtggctgaatagtattccactgtgtgtgtgtatatgtgtatgtgtgtggtgtgtgcatgtgtgtgtgcatgcgtgtgtgtgtgtttccattcatttctcaatggaagtttaggctaattctgtattttgcctgttgtgaacatgctgagatgaacatgggcgtgcagacatctcatcaactttcttaatagctctcacacctgcctttttctcaccatcaatgctgcttttaccttgattcagaccatattatttctctcctagacaactgcagtcatgtcctatctgctctccctgcctgcatctcaccattagcaatcaccaaaggcaggagaattttgtcacatccctttgaagcctaaacccttcagtggctccccttcatcaactctagtaggtcttgcactcactgtccctgcctcctctcagccttacctcttactgcaggccacctggccagcaccacctaactacttacaagccaacaagcccacctggctctcacacactgcactttctgcctggaggccatgccatcctcgcccttaccccatcctctctccctcgactccatgaccagctgaaaagctaacattcatttaacagtcaattcaacgctacttctacagttgaaggcttttttctaacccccatctctatccaggtaaatgttgtcactccttttttaatgaaaaactcatactctgaaaaacctcctatcataaaggctgaaacccttcagtaccaccctgtttaccacccaatagccacttagttctagggtagaaacccatgttactaatctctataggtttttacaagtgttgccagaaatgcaaagcattttcaatatatatcatttaatagttatttatctctcatacaaacccttaggctaggaattattagccttcattttaaaaatgagcaaagctgagactagaaacaccaaaaatgaccagagtcacataccactaagtggcaaagccaagatttgaaccccagtctcccatactgctttgatttgtaatcatttgtgttgcactgtttctcacttacctggcatttcatggtaatgattttgaagtcataagctcaaacatggtcaccgtagttgccctgggatgggtgtggggggtcaagatggataagacgtgatcacttcttgcctcccaaggcttcaccatccagtgggaggcagggtgactatgagttgcccttacacaagaagtcactggtaagtgtactagtacagagggtcttgcaaggtggggaggggaaggcaattttgtgacaatagcacctttaactcctgtcctctatgctaggccataaggtcactaaggtagagaccatattcttgtatcttgttaagtctccagggcccagctctgtgtctagcacataagagatggacatggcagatgcttgctaagtacttgctaaaggaatgaattcattaatggggggacagaaacaagctggcagatagtaaggtgaagataggttaatgcaattcaaaacatacttccaatttttttaattaccctattaaaaatatctgactaaaggttaagacgtcaggctttgttgtattttaaactttatagcrggggtgtccagtgttttggcttccttgggctacaatgaaagaagaattgtcttgggctacctataaaatacactaacactaaggatagctgatgggctttaaaaaaattcgcaaaaaaaagtctcataatgttttaagacagtttacaaatttgtgttgggccacacattcaaagacrtcctgggccacatgtggccagtgggccgcaggttggacaagtttgctttatagcaacccatcttccaaaagtgctccctctcatattttaaaattgtagtgaataaagtatatttgaattacatttgcatctcagtgaaccaaattgttgacactctagagtcttggaaagcggagaaagagggcagtgcccctagtgattgaaatgggtgtttgcagagggaagttggaaaacagggaattggtctaggaggctgggttctttagaacatgggcattagaccaggaggaaaagtatgaataagaggagggggaggataagtagatggggaggaggggagagaggagagggaagagaggcagcgatgaagagaagaaggatgaaaagaggaggaaaggggaggaggtggaagagaaagggtgaggcggggggaaggtaggggagaatatagtcaacaggaaaaataaaaaagcggcctgaattgccagcccaaacactctcagttttgcctgtgtgtgggtccttgggtcactcagacctgccttttttgttttgttttgttttgttttggtcaagagaggtcctctagattctgcctggctgagttccagccagacscctgctgttcactttaatactgatgcttctcttcttgctgatataattaccacaggaacctgagatcatgcaaaattctttcctggctcagagaaaagctgaactttgcacagatcacatctccaagactgtgtttgcaataacccaactcaagggctcctcatcccacagcccctgcctcaataaagggctgaagagccctctcacatctgacttccacaaatgggctgatcagggaccactctatgcccccagacacttttagctatagagtaaataaatctgctggatggatattaaatgagataatgaagttcctttctgcctccaaattatcttctgagggggaggcttaccagagcctgaagctggctcttggccaaktgattctgaagagaagagaaggaaaagtacctgctctccacaggaccacatcagatcagtccaccaccagcagaaagctgggggaaagtagttacagggaggcagagggagggaggtgagtaattgaagatgttccaggatttttaagctgaaacattagcagctgaagggcgccaaaacaccaaatatgtttgattagtgtctgaaagcaaagatcagtcatgatccaaggctgaagacctktgtaccctgggcatgactggcagaatctctgtgacagcagaagaggggcttcactttagttcaagaaacaaaaataataaacaaaggctgcccctgctgtaaatcaggctatacatacacacaaacacacacacacacacaccaaagccaagcacctacctgtgttctccatgttcccagaagagttcctctcaaggaggaattttccaagtttcttagcccctgattaattttgagatgatgcctgaaacaagagagtctgtagagaacccatcttctgctccgtctgcctgtctgtccaccccaggatgacatgagacctggaggatattacaatcttaaatggaggcaaaagctagagaatcagaaattacatctaaatatctgccaagagtgggaataagaagacaaagtttagacttgggaatcagtgaggtttgagttttagcctaactctcccactcagggtcggcttcgcgagtgtgcagcttgtgcagtcccaaaaggaacccatgcttgttttaatgttctgctattgctctcatgtgtgtcttaatttttgaaaaaggtgttccacattttcattttgcactggaccctgcaaactatgygtggtcctgtctcccctttctcaccctgggaccttgggacacattattttaccgcatggagsctctgctgattcatctgcaaagtgaatactaagctcaaagtgccactcagagaaacagatgatcgacggaggcagagcccctagttctgtgccccagtatatgcggacatcgcctcttccagtctactttttaatctctttaaaatgtttaatttatgctttgtatactgtggggtttttatttttagtagagacagcgattttcaccacgttggccaggctggtctcgaactcctgaccttaggtgatctgcctgcctcagcctcccacagtgctgggattacagatgtgagccaccaccccagcctggaatttttaatctaaaagttacctgcaagggcattgaatttatgtaatttagccattttctcactctatgtccttaagcaagttatttaatccctctatgcacctcagttttcccatctacaaaatgagatacagtagggtcattgtaagttaaatgcagagattaaaaagcacttaagactgtatttgatgtgatggactgaatagcatctcctccctaaaattcatgtgctgtgagaaatgagtttctgttgtttgtttttattatggctgcttgagcagactaatacacttggcacataactatgatcattaaaagttcattttattattatgtgtatttgtttctagtgtggctgtaacaaagtaccacacatttggtgtctttaaacaacagaggctggccgtcgtggctcatgccttaatcccagcaccttggaaggccgaggcaggcggatcacgaggtcaggagttcgagaccagtctggccaacatagtgaaaccccatctctagtaaaaatacaaaaaatgagccaggcgtgctggtgggtgcctataatcctarctactcgggaggctgaggcaggagaatcacttgaacctgggaagtggaggttgcagtgagccgagatcgcaccactgcactccagcccaggcaacagtgcragactctgtctcaaaacaaacaaacgaacaaacaaacaaatccagaatgcattctttcacaattccggaagcaagaagagtgagatcaaggggtgagcagggccctgctccctctgaaggctctagggaaaactcctgccttgcctcttcccagcttctggtggtggctggctgaccgtggcagcatgattccaatttctttccatcctcacatgtctttgtccctgtgtgtgtctctgtgccctctcctcttcttattaggacaccagccataatggatttaaggctcaccctaatctaatatgacctcttcttagctttaaaaattactctgcaaaaaacttatttccaaagaagatcacattctgagagtctgtgaggacatgaatttttgagaggcactatttaacccagtatagtattcacaccctttttagaagtgcatagggataaaatgtaagtttgtttaaaaggaagggagaggtgcacttatgatcttctaaactaatatgttctacttctcatcattctgcaactaatactcttccaccctggaaatgcactgcgaatatgaagtccatgtgacagtgattaactgaatcttgcttcattgacaagagtgacactgaaagccagcctcagagaatttgctgtttatgggcttattgaaccagtatctagtgaagtcctgccctgggcgcacaagatataatgacaaactaaacaggcataaatcctgttctcatgaagcttatactctattgtgggtgaagaacaatcaaaaagaataacaagtaaatatgttgtacaatagacagagatacattcggtgggggaagataatgcagggaacatgggaaggaaggtttggagggaggggtgcaattagagtcacccactcatcgcttacccaggackttcctggtgttggcactaaaagttttgcatctcaaaaaatcccccgacctgggtgaaccgagatggttggacacccatagtgcaatttcagagagggttctgagaaagggcttactgagaggcctggaggagatgaggacgtggaactgatccatagaaacagcttggggggcatggcggcaggcaaggaaaagcccacgttctaagccctgaggagggtgtgtgcagcaggctttctcttgttctcttgagcaagtcaggtgatrgaacctgacttgtgctgccttaggggtgagccagctgcatcagcatgtcttgggtactttctatttagacagggaaagacttgggccgcagctcctggccacacaacatgcaagaagaaggctggagctggttcctgcctttaaaccagcgtggcagggtcagtggctgatggagagaagggccagagtgccaaatattacaggacctcatggaccagagcaaaggctttggcttttactctgagactgatggggatggctacgagggtttccagcagagaagggatgtaacgtaactttgattttaacagggttcctctcagctctgtgtgaagaacagggtcaagagtggaagaagggagccaattaagaggcttatttcaataaaagaaaatggatgagggtggctaggaccaaggaggtgatgagacagggtcagaacctgaatgtctttaaagatagggctaaggatctgctgatagattagatgtgggttatatgggttttattctgaagcaactggtaaaatggagacaccactaaccaagatgggggtcgatgaggaggaacaaggggccagctttgagaatggcagatctgagacacctgttagacctataatgaagacatcatgtaagcaattccatactgagtctgaaggtcaaggcagggcatgcagttaggagttttcagcaaagagattgtatttacagctgtaagacatgatgataccacaaggaaatgagytagatggaaaagaaaagaggtctgaggcctgagccctgaggctcacctatgatataagataatggtggaaagaaggaattaaccacagagactggtgaagcatcaccagtgaagtggaagtaaaatctgaagttggggaagctaagtaggaacaaaggtataaacaggagtagagccccatcagctgggtccagtgctgctggtagcccaagagaagcgaggctgaggacagccagcagcatgggacatggagggcctccaggacctgsaaaggagcagtttcagtggcatggcaggaccaggcttaggaaaaaatggggaggaggaaaatggaagcaatcagtctagacaactcttttcagaagttgtacagcaaaaaaaggagacaagtagaaaggaaagtgatgtcaagaaagactgctgtaggataagaaatttcacagcaggctgtatgctgatgggaaaaatctagcagagagggtgagatggatggagtcagggacaaaggagaatgctggagcagcatgcctacatgacaagggatggacctgtaaacacctgtggggctcggccctcactaggagcactgagagttcctcyccacacctggagagaggcacatgtgtgcacacaggtgcaggtaagtggagtgagctgtagaagcaggtgtgcactactataatctcctgccaaaggttcactccagacatgaggttaaagctgtgccctgtgcagccttggaggtgagccagccgcatcaccaagtctcaggtactttcttcttgtaataggaaaatacctatgccacagcccctgggcatacaacatgtaagaggaaggctagagctagtcctttgcctttaaatcagtatgtcgtaagcaatttcttaaaccagaggtcagcacagttttcctgtcttctccaggcacttctccagcccactccgcttaccggcacctgcccctgtgtgcacatatgtgccttttctccaggaatggggaggaactctcagggctcctggtgagggccgaggcccacaggcatgcataggtcccatcccttgtcacctaggcatgctgctccagcattctccccttttcccygactccacccatcaccctctctgctagatctttcccattggcatacagcctgctgtaaaatttctttttgattgtttcacccacaatagagtataagcttcatgagagagagcaggatttatgtctgtttatttttgactttgaagccaaaaagtaagtagtgtaaaagcagaggagacccaacccagctgtgctgaaccacacagaaccatgttctagccgttggcccatgctgttcccaagaatttgggaaagggcatgaaygtgtaaactgagtactacagatctggaaactacatcatcaagagattactctggggaaattcaaaggagatttgggaaataggagagatgtaagaaccacttctgagtaccgtcacttgaagggctggcccatggagaagagttcggctctttctatattgccccagagctgccatctcagcccaaaggtataatggatcgacggaggaaggatctctcattcagaggcttcccaacagtggcctgagctgaggtccccagggagtgaatccctaccagccagcatagatgggggtaaaatggatgacctggaactaaatcctgttcatctgtgacctgtctgtgccccaccaccaccaaaaatgtgaggcttgattctttgaaaagcctcaactgcaaactccaggttaaagtctcagcagagtagatatttagaaagttgaggagggtggcaaggcttcctgtgtaatcagaggtggagacatgctgtgtttcattaggcayggagcgaactttgacatgcaggtcacaaaaatagaacaggctactttataatgggattgtgtactatcatagcccctaccatacatgaacacttatagatattaaaaacaaggagataggaggctttgacgtttcaccctcctaaatcatttcaaactggggaaytcaaagccaacgcatcccatgggtctctctaataatcatatctgagaatgggaattgaaatgtgccatggcttattcagtgcttaggtagaagacaccacagaaccgtatagtttaagttcaaatctggaagagaagttcaaatccacattaactccarccctcaaagcagcatgcacttgtccatgatgtgtggggatgtgcaactcaggacacggcaagcccatcaaaggcaaagactttgtatccctacctcagtgcctggaatataatattcaataactacctactggatgaataaatgaatgaatgacttgactatcccccaggcagctcatcctcttcctttaaagtggtgcttctctgactcacgcatgcactagaactacctggaaagcctgttaaaacacaggttgccaagccccatcccgagagtttctgagtcagtaggactgaaggggccgcaattttgcaactcaaccaagttcccaggtgatgcttatgggaccacactttgaaaatcactgctttaaggcaaggtagcaggaaaggcaggcgtgactttggagtcaagcaatcaagattcaaattctgttctgactcttcttagctgggtggcctttagcaattccgtcarcccctctgtgcctcaaattcctcctatataaaatggggacaaaatattgactgcacagggttgcaaggtatattatggatatcgggtgaagttttcttaaactgcactgaggtgagaagccatccaaatatcacctagtgtttccaaggaatattaacaattatcagtgcatcccagaccattagacttggggtacaaggaaacatgcaatgttgtacccactctccaaaattatactgtccacttggtatggcaaacaccaatcattcaatataaagtgacgatgacagacgagggctgttggtgcagagagaggcacccacgaagcttcctcagaggagaggccaggcacagggatacatgcttcaacttgtctagggagcccacagacattgagattagccagcccattagagyttagggaatgtctttactcttaatagcatatatttggttttatgtaattattttaacaggtttgttgtcttatagttgattcaaaaacctgcatataaaatatacaatttgataagttttgatatgtttagacacctatgaaacatcaccacaattaagatcctgaacatatccatcattcccaacagtttattcataccttcataattctttcttcctgctcctccccgtcccctcattccagtgcaactattgatctgctttctattacaataggttactctgcattttccagaattttatataaatgaaataatcatgataggtactctttaatatctggcttctttcacttagtgtaatttgtttgagatttatcatattcttgtgtgtttcaagagttcattatttttgttctggagtagtttccaatttggtgcaaataaatttgcamatttttttaatttcttaaagttttattttaattgacaaatataattatacatattatagagtacaatgtgatgttttgatacatgtatataatatgtaatgatcaaaacagaataagtagcatattcattacctcgaatatttatcatttatttgtgataagaaaatttaaaatccttccttctagctgtttttaaatatacagtatattattattaattatagtcactctactgtgcaatagaacagatcttattcctcctatctaactgtaagtttgtacccattgtcaagcatctccccagtccctcttcacccccatccccagtccccaccattgactctctacttctatgagttcaacttttgtagattccacatatgtgtgagattatatgacatttgtctttctgtgcctggcttatttcacttaccataatgcccttcagattcatccatgttttctaaaatgacaggatttccttcttttatggctgaatagtattccgttgtgtatatataacacattttttgaatttactcatccattgatggaaacttagcaatcccactactgggtgtatacccaaaggaaatgaaatcaatatgccaaaggaatgtctgcactcccgtgttcactgcagcatcattcacaattgccaggatatgaaatcaacttaagtgttcaatgacaaatgaagggaaatattgtatgtgagtttatagcttgtcaatctttggagcttagaaattcttggtgcataacaccaagccaatatgaaataaatgcatgtgatagacaagcatgtgatataatccaaaactattcttgactttcttgacaccccttctctgccgcctgactgccccgaacacaaacgcacacacacatgcacacatgtggacacacatataaacaccacacacatatgtacatatatgtgcatgactacacacaaatgcacacatgtggatgcacatgcacataaacaacacacatgtgtgtgtgcacccacacacaggcacacatacatgtggacacaggcatgaaaacaacacacacatgcacacatgcaaatgcatackcacacaaatgcatgcatgtggacacatacatggacatacatgtgcacataaacatcacacatgcacacatgtactgtacacatgtgcacataaacatcacacatgcacacatgtactgtacacatgtagacatacacacatcactacacatgtactgtacacatgtagacatacacacatcactacaaatgtgcccacatgtgtgtccacacacatatgtatgcaggtggacacayatgcacataaacaccatacacacatatatgcacatatacacccacacccacacgcaatatgcacacatagttgcacacaggcacacacacacaaatctacatctgggactagcaaatgttagaagctaatttgcaggaacgccacacagcaccaatcttgttgattctatcaccaccaatataatctttcaaaatatccatatatctgactccatccctaacccaagccattgtcattgcctgcctggatcttgcagtaggtctcccctcatgtttccctcccctcatgacaataagaatgaactttccaaaatccaaacctgacttggtctctttctgcctacaccctttcagtgcttstcactactcttagcatagagacccattgtcttcaatatcatctgtgtgtcctccagggccttgtgtgttctggcccccactacctctctcagctcttttccttcaacttatrgcctggcttaccacactgtggccaaactgacctcgtcttcactctttggacctcctgtacattctccccaacttccagacctcatctatgctggcccctatttctggatgctccccttcccatgcccctagcttccccaacacacacaaactcatacactcactgctagaaaaacccctcctcaccctttagaactgaagctagaaatcacttgctgagggatcccttcctagatccttcagattagatcaaaatggcctgatctcctcatccctctaccctgtatatttccaacataaattctattaaaattgaactagggcatgttctgtgtatttatttttaacatctgacctccctacttgggttggtagagctcatgtatcttgttcatccaacatataagaactcaatgaatagttactgtattaatttcctactgctgctgtaaccaatggctacaaatttagtggcttgaaacaacagaaatctataaccttactgtttggaggtcagaaatccaaaatgaaacttacagggctgtgctccttccagaggctctgcaaagtcctttttgtcatgtaacctgacatatgcacaggttccaggaattaagacacaggcatctttggggcctgggttcaggaagcattattctgcctaccaccattgctaaataagacaccaaggtttccctctcttagcattaaaaccgaaaccacaggtaaaggtaaaggaaatgtcccaggatagcacccattccttcatttaatcattcactcattcattcttctctacagtctgtctaggtgctgagtagtaaacacaacagtggaaaatatatgctccaggaatattacattccctagaggaagaggacaataaataagcaatatcagggataagtgctaaggagagaaggtaaaacagggaaggaagataagaatatgtatgtgggaatgggatgctgcgttcaattttaaataaggtggtcaagaagactgcactgcaaagatgagatttgaggaaagacctgtaggaggtgagggagtaagccatacacttgtcccagggaagagtagcccagcaagagaacaacaggtgcagaagtcctgaggccaaagcaggctgagcttgttctcasgtcaktgtggcaaggggcaaaggggatcagtgcagctggagcagagtgagagagggagacgataagagagcggacaggtcttggcaagccttgcaagtcacagtgaagactggttttgaccttgagtaaaacagaaagccataggaggtttggcacagagcagggacaggatctgatttacatgtgaaggggcagacctactccttaaagagtaccaatttacacccatctccactcctgacccttagcaagtgctcattaaatatatgtgactggctgaaagcatgattctcagagagaaaagcagataactagaggatattgaaccatcagaggtagctcattgtgagccaggggcctgttttcaggagcccaggctgctggaagaataaacaccagggctaacaccattgcctggctctctttcagttgcttggtgaagaccgatttcaagacattgaaaagattaagaccattggcagcacctacatggccgtgtcaggcctgtcacctgaaaaacaggtaaaggactctttggactcagccacaatgcatggtggggtcttgctgttgtcatgtcacygacggtggtgaagcctctgtcaccaagatccttggggaaagatggggagaaaatctaatggactggattataatagttacgtgatgtggatttgcccccaaggtaggtagagtctaccagatgaagccaygctgcttttttgagaaacttctaggctttgttctgaacctcattgttcccttgaacaaaatcaagagcccagaaatagcctattgtgatttagttgtggatcttactaaacccctaatactagcctcttttttcctattttggttttgtctttcaaaagtcttacatcataataataacagttgctgctttttggagtgttgactgtgttccaggcactggtgttaaatggcaacactgtctaccttccagggttaatggatgaattatctcagataatgtcatgctccccaagcaaagccttgcatctagtaaagtcctcaattagtgttaaaagaatatgagtccaagatacttggggaaatggaattctcatcaatttcttccaatccttcgtatgcttttttccaactaaaaacaataaaatacttcaagagtgactatctgggatgaaactcatgctggttattatttggtacgtgtgcagcagggatcagaaaactacagctcacaggtcaaatctggcccaccatctgtttttataaataaaactttattggaaaacagccatgcccattcatttatattttgcctattgctcctttcaagctaaaatggcaatgttgagtgtcacaacaaagaccatatggtcgacaaaccttaaaatattggctatctagcctttattgaaactgtttgctaacctctgttctacaggggcacaaagttctctcatataaaaaatctcattcaatacctacgaggtaggaagggcaagtatgcttatccccattttatagatttggaaactgaggttcagagaggcccagaggcttatgcagcacttcccttaggagttttgtaagcaaatgtatcccttaaacacacactgtgagcaattcaaaggaaatagacacagttcttagactggaaaagctacacatacataagagcacatatacacacacatacccatacccacacatatacccatacccacacacatacccatacccacatacactcacggccacccacacgcccacacacccccaacacacacacacatacacacatacactcattcacacacatgccagtgaacatacactacggaattgatgctacatcaacctgaacagacaggtgtagatgtggaagaaggaatacaatgacccacatatactacactcttgcaagcaaatcttatgtcttcccatgttctgagataccagtgacttgagtgtagaggggctcacccacatgattatttccttaaagggatgtgcaggtagggttgggttaggacgtaaagcccctgctgcagaaatgttaatgttcccccacattccgcattaaatgatttcttctcctcatgtttgcttcagcaatgtgaagacaagtggggacatttgtgtgctctggctgacttctcactygccctgacagaaagcatacaggagatcaacaagcattcattcaacaattttgaactccggattggtgagtagcagctgcaggtggggcctgatagagccagctgaccttgctccaacagaccctcccctgccttgggcatcaatccaggaaagctttttcctgcaaaatgcaatagatctagcatgaccctgccaaggatagggacaaggtcagctcaggcctttcttagtttcctctcagtcaagatgctggaaacaagagtaggatactggcttgtgtgcagaaatacaaagcagccagcctttggcaaatgctagactattgtgaacccctcttccaacttgcctgcccatgcaaggtcgtgcatagagatgtagctgactaatcagtcatttaattctgactcctgggtagctcaatgctggtggtcaatgtattgctctcaaggtcttcaggataattccttcagacaaaagcaggattctactcctgaggatggcagatactatayttccagggacaggctttactcagccacaaagctcgccatttctttgggcttaaagacatcaccgcacaaagcaacaaygtaacattaatcactgcaatcaataataatcctttatatttgccattccttccacatctctactgagcctcagtgacctcctaaaatgcagtctgaatatccctggtctagtccacattctcattttgtagatgagtaaatgcgggcctaygaaaagggagtaactagcctaagatcacacagtcacaccagcagcagctccagcatttcctaactctgagacaatgacattctggctgccagagtgcagtttaaaataacttttgctacggtcctcacactgtagacatcttctggctgatatgccattttactttatctgcttctcccttagcagctttcaagaaaaacaggtcaagaaataccaatatctgacttgtcagatctaaggaatgccatatgtctttgctctttgcattaaagggcttatattttatgtttttgatctatggatgggatgttcagcgcttgttcccacatcttccatcaatcttatcaatgtcatttctgaaattgttgactacacaattgaaccaggaataaaaagggaactgtaatgctgaacagagatattctaagtaaattctgaagatgttgccaaatcagggtcaacccttgccatgacatattacactcgtagtatagtttcactgatctcagaggttggaaaattaacttcccaactgaattaagcatctcaatttgtgttttgggtctgctgtaaccagctgtatgactttgggtgaatcatttaaaccttctgtgtctccgtttcctcctatgtaagctgggtgttaaattattacctcctctgcctctctacctcayaataataatatgagaatcaaatgggatattggctgtcaaagttctctgcaaattttaaagagctaactatcattgtgattcccatgtactccatagagtgagattttcaaatttccagtcacttatatcagtgggtatacgtgtcttkcttttgcctcggcctagaataatcttaccgagatatctgcatggctattcccaccatattctctgctcaacaaggtctttgctaacctccttactcygaratrtactctcttccatctttctccattattttaccctcattgatttttytttgtagccctaatcattcattaatattatattacatttgtaaaattattttctatctctccccagtagaaggtaaattccatggggaccagggctgtatttctttcctttcccaccacatccccaatgcctaggactgtacctggctcatagcaagtgcctagtcaatgtttgtagaatgaaataattgtcttttagaaagagacatacatgcccactaacaggtttagtgaaatgctaccatttctagaattctatgcttcctagtggaggaggcactgaaactgtctttaaaagtatttaccagataaactgtgaaagtgtggggaagtaatagcacaagcagggggaaagtcaggacaaaggcacaaaggtgggtactggctggaaggttaggaaaactccagcagttcagtgtgaatataatgcagcagtaaggaagagagtgggataaatgaggctggaaaatcaggcaaaagccatatcagagaggttattgattgtgagtctaaggatcattggctttatcctgtaagtgaaaggagccctggaagatatttaagtgggttgtaacttgatcagatrtgcaacttgatcagaacgagccctcccgctcctgcagcagtgtggaggatgagctcaagggaacaagggaggagacagggaggacagttagaaagccatcgccatggaccaagggaatgatgctgaggacctgggctaaaacagagagggaaaaggcctgtgcaggctctcagagcactgtgtcagcagaagcaggagatcctagggtcctgacttctggtccatgctctgatcatctcacagactaagacaagtcagtgctcatatgacaataataattatattcaattgaacactcactggttgccaggcaccatgccacagtggctttacttgtattatctcattaaatctgcctttaattatttccattctactgatgagaaaagtgaggtccaaataggttaattaactgacycaggtgatacatctaataagtgactgggggcaggatctggaccctcccgttcatccacagagaccccacacatagtgatcactgtcccagggaggggtccaaacaccccattgtcccccttctccstctgacttcttgctcctttgcttcaccccccaggcatcagccacggctcagtggtagctggcgttatcggcgctaagaaaccacagtatgacatttggggcaaaactgtgaacctggcaagccgaatggacagcacgggggttagtggccggatccaagtcccagaggagacctatctcatcctgaaggaccagggctttgcctttgattaccgaggggagatctatgtgaagggtatcagtgaacaggaaggaaaaatcaaaacgtactttcttctgggaagagtccaacccaacccattcatcttgcccccaagaagactgcctgggcagtactccctggccgcggttgtcctgggacttgtccagtccctcaataggcaaaggcagaagcagctactcaatgagaacaacaacacaggaatcatcaagggtcattacaaccggcggactttgttgtcacccagcggcacagagcctggagcccaggctgaaggcaccgacaaatctgatttgccataaaagcattttctttctgttttttttttttttgtatttcttttatatataaaataaatatactaataaaaaggtttaattttttttagaacaaggatggtttcgttggtctttgaatgtaccagatcaaggacacaatttgagattctcttcaaatgttcccttcacaaatatttattggtcacctcttgtgtacaaggtttattgggaggcaaagataaatgagatctagtttctgactttgagagtttgagagacttacaactaggtggaagagtgggacatgtgaagtgaacagaaactccatacagtcagatactcaccaccatctgctatttttgagcacttgccatgtgccaggccaagcgccaaattttttacataatgacctcctgtaatcctcacagcacttgaccagtacgttcatcagtatttgctgagcaactacaatgtggatatggctgtcctatcctccagggaaatcctagcaaaagtgtttcccttatagagctaacattctggttggggaataatatataatattcttattaaccaatacataaataatctgctttcagattgaggtagaggcaacaaagaaaattaagttggccacttgggataataatctgctttcagatagaggtagaggcaacaaagaaaattaagttggccacttgggataaagaatgggaggacagggatgctgatttaactgagtcaccagggaaggcttttttgaagatgtgatgtcaacgattggccctaaataatagaaagaggtgacccataagacctgagagaaaagtttcgcaagaaaaagtaacagcaagtgcaaaagcccagaggggtatcaagtccggcacattggaggaacaatgagaaaggcaatgggtaagtgagctactgtgggcaagcacactgtttcctggaagacacctacgtgcttatgaccacaagattgccaggaaaatttcatacaggtgagaaagcccagaaaaattaaaggatttggccaaggtcatgtagttagttgtagaactagcttcataactatattgttcaataaaagccaactgctataacaaataactcccaatcttagtggctaaaacacaataaaagatgtacttcttgcttatgttctattggatatgtgtcaaggggtctcctgtgcaatttttgggaagcctaacctccttctgcattggagttctcttcttggccctctctatccagccaactgaggagaaaaaagggaaagaaacaagaatcacttagaaggtctcagctaccaggcatacatcatctttctgtcccacctcactgcaggggaagttagggaatggatgattcctgtgttcccttaccaaaaggaaaagtgaaatgtaactgcctatgccacaggcacctgagtctttctgagcccagagtccatgtttataaacactaagctattctgataagcgctatgttggaggtacaaggtttaagtaattgaatgagaattataaaatcccaaccattctctaaacacttgactctgaacaccatcccatttaaaagaaacttagccccaggtaacaaatccacagtagatataccctcaaaaaaacatctacctgaggcatctcaagtgggaccctaatgttagaagtgaagctgtcttctcttgaggcacaaagcagagagggaattgattcaggtaaaccttgaactttgaaccacatttgggatgctgtttgctctaggaaacgatatacacatcaaagaagtatgccccctccaaattcatgcaaggccccaaaggaatgtgaagatgacaagtgaaaagcctcagcatactgtaaatccctctaccaatgccagaggctgttacaatcttcatagactcagagaatccgaggtcaggaaagccccatgggttgttcagtccaacagactgaggacatttaaacaaagtaaagcttcatgcctgctgagacttggaaccaccagatgcaggtggggagctgagctcaggtaggtcgaggcttggcaaacaaagctagcaaaaaggctggcctccaaaaggtagttaggctgtgaaggcacggtatctgaaaaacagaaaacttgatgtagatcatcaagctctggtctaccccagagcataaggcccatctcaaaaccacagccagtatcaacagagactccagtaggcagacaagccatggtgagctggatctacccccaagaagagaggctagtagggaaagacttcgtttctaaaccctgagctaggactcaggacaaagtccctggactagaagaacttggccctaggcaagataactgggcagaaactaaggtaagaaccatcaggcatgtggatgccaccaatttgggggtgacagtggggttaccactgtaaagcttcacccagaacctgttcctgactcaatgatgtcaaccctcaagatacaacatatggaggagrtggacactccatcctgggtctgggaggtgtgacttcattcaggactccaggaaatagaggagcaaggggacatgatgatgctgagaattctcatcagattgccaaggagcccatcaagtgggcatctggcctctactccaattcacccagcaccaaaacgttgagtcccttccctctagatcagcacattcattggaaccagcagatgtggtctttccatactaaggcaaaaggacaagagacagaaccataaactggcttatggttgaatagctaagaaaacaaccctcttcttgggccttgcatgagtccrgagggggacatgaaggcacacgatcttcctgaattagaagtatgtttctgtttgcctacatttttggtccattcagctcacttagtaaaagaacctgaaatgtcaagtgatttctgggaaacctggcatagtattttagacagggatatcaatcttaccttttcctgctctgaactatgcctgtgagatgtggggtttgattttagaaatgtcaaggataaacacatgccaagggaatggtgcccgaaatgctgaaatacaaggagaaattcaataaggtttagttgaggctttctcaataactctgtatttttgacttactcttctggaagctgatccaggtgggtgcccccaccattcatcagcctgtgtaggaaaagcacagtctcccgtgagacaagcacagccttgcctagagattgggcaaggtatctttagctttcattcaaggactgggtttgaggagctgctgcctcacaatctgccatcacataaagccaggtgggtcacctggagctcagaaatgcccccacaccagtttcaccaattccttccttctttagggaccatgggagtgtagctgctttccactggaagttacaactatgttgtcatctccattttacaaatgaggaaactgaggcacaaagagcttgagcaactcacccaaggtctagcaactggaaaacagggattcaaagccaggtggtctagctcaagagtcctgtccttaaacaccactgttgaagcttgtaagggggtgaataatgttcattaaatgaaagttggatgtctgagtagactccccacttgcatgctgcaggctgtgtgaatgggtaagctgtgaaaaactctggaatgacagccattcagacagcctggggccacttgtcctgatcccaaacagcttcatcctcttcccccaatgggttaaacagcgatttttattttctttctgtcctgtgagatgaaaaaggtcagaaagtactgggctaactactcagaggcagtttcttgaggtgcacaggctttggtttgaatgctatatttatcacttaccagctgtttgatgctgggcatgcagcaggacctctgtgtgccccagactctttacctaccacctgggcatcagaaaggaagttgttgtgatttagaatcccgaagttgtaagacttgaaaagtgtgggaaacgtatcatatacagaaatatctcattttatttcacttcactttatgtatttcacagatattgcattttattacaaattgaaggtttgtggcaaccctgcctcaagcaagtctgtcacaatcatttttccaatgcatgtgctcgctttgtgtctgtgtcacattttggagatccttgcaatatttcaaactttttcattattattatatgtgttatggttatctgtggccagtgatctttaatgtcactatgtattctttttggggtgccacaaactgcacccacataagatggcaaatttaatcaataaatgtcacgtgtcctctggctgttccactaccaaccattccccaatcttgctgcttctccttgggcctccctatttcctgagacacaacaatattgaaattagaacaattaataaccctaccatggcctctaagagttcaagaacctgtattaatccattttcatactgctgataaagacatacccaagactgggcaatttgcaaaataaagaggtttaatggacttagagttccacatggctggggaggcctcacaatcctggtggtaggcaaggaggagcaagttacatctcacctggatggcagcaggcaaaaagggagcttcttgaaggaaactcccatttttaaaaccatcagatctcatgagactcattcactatcaagagaacagcacaggaaagacccactcccataattcaatcacctcccactgagttcctcccatgatgtgggaattatgggagttacaattcaagatgagatttgggtgaggacacacccaaactatatcattccacacctaacccttcccaagtctcatgtcctcacatttcaaaaccaatcataccttcccaacagtcccccaaagtcttaactcatttcagcattaactcaaaagtccaccacccagtgtttcatttgagacaaggcaagtctgttccacctatgagcctgtaaaatcaaaatcaagttagttagttcttagatacaatgggggcataggcattgggtaaatacagccattccaaatgagagaaattggccaaaacaaaaaggctacaggcctcatgcgagtccaacatccaacagagaagtcaaattttaaagcttcaaaatgatctcctttgactccatgtctcacatccaggtcacactgatgtaagaggtgggttcccatggtgttgggcaactctccccctgtggctctgcaaggtacagcctggaggctggtgttgagtgtctgtggcttttctaggcacatagtgcaaaccgtcagtggatctactattctggtgtctggaggatggtggtcctcttctcacagctccactaggtggtgccccagtagggactctgtgtggggctccaaccccacatttcacttccacactgccctagcagaggttctccgtgagatccccactcctgcagcaaacttctgcctgaacatccacgcatttccatacatcctctgaaatttaggtggagtttcccaaaccacaattcttgacttctgtgcaccctcagactcaacaccacatggaagctgccaaggcttaaggcttgcaccatctgaagccaagatctgagctgtatcttggctcaatttagtcatggctggagtggctgggatgcagggcaccaagtccccagactgcatacagcatgggaaccctgggcctggcccacgaaactattttttcctcctaggcctctgggcctgtgatggagggagctgctgtgaagacctctgcaatgccctgaagacattttccccattgtcttggggattaatatttggatcctcattacatatacaaatttctgcaggtggcttgaatttctcctcagaaaatgggcttttcttttctatcacattgtcaggctgcaaattttctgaatttgtatgctctgtttcccttataaaattgaatgtctttaacagcacccaagtcacctcttgaatgctttgctgcttagaaattttcttccaccaaataccctaaatcagctctctcaagttcaaagttccacaaatctctaggacaggggcaaattgctgccactctctttgctaaa

SEQ ID NO: 94562 - DNA, 87579 bp, Homo sapiens
ggaggggctgcctgcccctggggtgggggccaggctgcagcaggctgcagcaagacctgaagcaggcgtagggcctgaaagcccagctggctgggctctgggggcctcccagggcagcctggcccagggagcagtcctgactctgcaggggatgcccagcgaggggtcacagacccctcacaacttcgcctcctctctccctggaaaggagctggggaacccgtagtgcaaatctgtggaccactcagtgatggagggaggctatgcccgaaggtggacactggggggtgccccctccaccacctcggcctccactgctgtcagtacagccgcttctcctaagagtgcaggccatggacgccaccctcaatctgggccgacatggtacgcttctcaaacttgagctctcctgagtacatcatggaccaaaggacagacaggctgcgggccctgatatcctggcagccatgctggatgcccactatgaggtagggcacaaacttctgaatggaccctttgtcctggatggagcccgagacaccctgtgtgatcttcaccttatcctcctcactgaagtatcgtgcctggctgctgctgctcttctccatggcatccagcaagcctgtgccccagtatttcttgagccgcaccccatctgagaactattcgctgggggcctccgaggtggcagccagcagggagcccatcatcactatggaggcaccaagggccggcaccttgatgtgccccacagtcaggatgccaccatcggctatgatgggcacaccaaagtgccgggcatactcagccaccttgtacacacagtgccctgggggcaaccacatgccatcacttcctgggtgatgcagagggagccgcagcctatgcccacacacagcccgtccacaccagcatcaatcaggttcttggcctgggctgctgtcaccacgttccccccaatcacctggaggtgggagtacttctgtttgacgtaatacaccatggcagttgatacagcaagttcccttcggacaagtccaagactatgacgtcgacacccgcctgggtgagcaggtccaggcggtatttgtcatcctcacaggtgcccacagctgccccacacagcagctgctcatgggaatccttggaggccacagggtagtctcggttcttcaggtcggtgagggcaatgatggccaccagctcatcatcgtcattgacgataggcagcttcactttcttgctttgctgcaggatctcatttgcctctttcaacatcactcctgctggagccaccaccagctcaatccttggcatcatcacctcactgaggagggtggtgtggtccttctcagcaagaaagtcgatgtctcgggaagtgacgatgcccaccggcttgctgcccatggtgcctgtctcagtgatggggataccagagaagccatgccgcatcgtggcctccagcacatcacccacagggtgcgaggggctcagcaccatggggtccgtgatgaagccatgttcaaacttcttgaccttccgcacctccttggcctggaactctggggtgcagttgtggtgaatgaaaccaatacctcccaccagagccatcgtgatggccatgttgccctctgtcacagtgtccatggaggaggagatcagcggcgtcttcagcgtgatcttccaggtaagggctgaggtgaggtccgcctcatcagctatgaagtctatgaatcctgggagaatcaggaactcgttgtaggtgaggctgtcggctctggcgaagagctgctgcgtggtgagcccgtcctcgggcacgcagccggtgccctggctcatcaggtagtctgtcaggctgccagagacccggcgacccaacataaacacccgctcggctgccagcctgccagggcaggctatttttttgagactgggtctcactatgttcccccgaatggtttggaactgctgggctcaagcgatcctcccacctcagcctcccaagtagctggtactacaggcccgcaccaccacacctggctttgtgtagtgtgtttaataagctccctggggaattctatctttgaagttctggaagcattttcaactattttggacttcctacctcagggcctttgcacttgttcttcccattctctggaaaaccctgccaattttttgatcggctgattccttctcatattttacgtgtcatctaaaatgtcgcctcctcagactgatctttcttttttatttatttatttttgagctggagtcccactctgtcgccaaggctggagtgcagtggcatgatcttggctcactgcaacctctgcctcacgggttcaagcagttctcctgcctcagcctcccaagtagctgggattacaagtgtgtgccaccatgcctggctaatttttgtatttctagtagagacaaggttttgccatgttggccaggctagtctcgaactcctgacctcaagcaatctgcctgcctcgccctcccaaagtgctgggattacaggtgtgacacatgcctggcctcagacctttctttctttccttctttttttgagatggagtttcgctcttgttgcccaagctggagtgcaatggcgtaatctcggctcaccgcaacctctgcctcccaggttcaagaaattcttctgcctcagcctcctgagtagctgggattacaggtgcccgccaccatgcccggctaattttgtatttttggtagagatggggtttctccatgttggtcaggctgctctagaactcccgacctcaggtgatacccacctcggcctcccaaagtgctgggattacaggtgtgagccgccccgcctggcctcagattgacctttcaagtccactgtatgtttctctcctcttccttcaaccactctgtatcacatgaccctgtttcattttctttataccacttgctataatgaagttaccttgtttatttacttccttgtttatccactgagtacctcttagaatgtaagctccatgaacctagggttcctggttcactgctttactccctgcacctctaactatgcttagaataagatgggggctcaattaaaatttcctgaataaacaaatcaaatgagatggtatatacagtatatagtcgtgtggttttttttttttttgagacggagtcttgctgtgtcgccaggttggagtgcagtggtgccatctcggctcactgcaacctctgcctcccaggttcaagcaatccccctgcctcagcctcctgagtagctggggctacaggcgtgcaccaccacgcccagctaattttttgtattttcagtagagacggggtttcaccatgttgaccaagatggtctcaatctcttgacctcgtgatctgcccacctcggcctcccaaagtggggggattacaggcgtgagccaccgtgcccagccataaatagtattttaaaaccaagtaatagtaaactctgctactttttaaattttttaaactgtactactttaaatattgttcctttctttttcacctatgttggttaaacaattattttaaagtttttttctattgtaaaagtgaagcatattcatgcaagaaaaatcagaaaaattgtttgggcatggtggctcacacctgtaatcccaggctttgggaggctgtggtgggaggattgcttgaggccaggagtttgagaccagcctgggcaacagagtgagaccccgtctctaaaaacaaattagccaggtgtgatggcacacacctgtggtcccagctactagggaggctgaggtggaaggattgcttgagccctggaggtcaaagctgcagtgaaccgtggctgcgccactgcactccagcctgggtgacagaacaataatctgtcttcctggggacggtagctcacgcctgtaatcctagaactttgggaggccaaggcaggtggatcacctgaggtcagtagttcgagaccagcctggccagcatggtaagaccccatctctactaaaaatacaaaaattagctgggcatggtggtgcacgcctgtaataccagctactctggaggcttaggcaggacaatcgcttgaacccgggaggcagaggttgcagttagctgagatcatgccactgcactccagcctgggcaacagagcaagattctgtctcaaaaaaaaaaaaaaaaaaaaaagaacaagaacctctctcaaaaaaaaagcaggactcccagttaaatgcgaagttcagataaacaacaaatactttttatatgtccccagacattgcattcttcattcagcagccacgcagattatttttaaagtcggaataagtcaaacctctgttcaaaaccctgagatgtcttttcatctcagggtttggatgggaatttgggggctataataaaagccctcaaaagtttcaaactaagacccagagtcccgtaggacctgctcccagtggctctgttctcattggcctcgccactctccccttcctgcttcccgcctctctcttcttccagaaccatctaacctttaggcctttgtcagacttctcagccagaccttccctaatcaccctattttaaattgcactcttccctcccccttccctactttatatttctctgtaatgcttgccactttaaaacttttacatttagtttattgtctttcaccttccactagagtttaagttccattagggcatttttgttctttttattcactgctgcatccccagtgcttagaataatgcctggtacataatagaggctcaatatgtatttaacaaatattaaattaatgaactgtagttatccaaatcaataaatagctttcgtttatttcgctaagagccctcggacattctgatcattcagcgtgttacctatttcaaagtagtcaagtaactgccatcttagagaagccatcttcttgtattctgtgataatagcgaacgcttattgagcacttattatgtgcaagcacggctccaaggtatcataatagtactttagggccttaggtattacaatcggagttactttccgattatatgtacattccgagatacgtataaaaagtatttgttctttatctgaacttcacatttaactgggagtcctgctcttttttttgaaacaggttcttttttttttttttttttttttttgagacagagtcttgctctgttgcccaggctggagtgcagtggcacgatcttggctcactgcaacctgtgcctcccggcttcaagcgattctcctgcctcagcgtgtgaggaaattagaatgcagggaggtgaataatttgttcgagatcttctatgtgggatgatcaatggcaaagatgggtacagaacccgcgtccttaactaaacgatggcactctgctggctcgcttttagctccttgtgttttctttctttttggtggttaacttgttttcgtcaagccctcaattatttaaaaaaaaaaaaagttcttaaggctcaaagtcaaaacctgtcaaaggccaagtgctttatttccctccagtcaaggactgggcattttgcatttgaatcctggatggcgggaagcagcaagcaggtgtcaacaggggtggggaggagacgccggaccccaccagccaatcagagcgcgcagaggcctcccttcccccgccgccgtcccgcgccaaaattccaaacgggctacgcaccgctcccaccgtctccttccgccgagctcagcgagccggaactatgtgaagaaaaagaagtcagcgttttccccaggactctccgctcaggtcctctatactgtcggcctgtgttcctctccacgttggcccggcctccttcgctctacaaatgggaggagagtttcgagcctgctgttctatggtggtggcgtgggcgggacagacggcggagggattctgggcgcgcgcgctgcggccgctggcgcggagcttgtggcgccagaattcggagcgcggaagagccagagctgcgagcgcctggarctggatctctctccggtcgcgcacgccgaggccagtagggagagaagatggtggttctccgcagcagcttggagctgcacaaccactccgcggcctcggccacgggctccttggacctgtccagtgacttcctcagtctggagcacatcggccggaggcggctccgctcggccggcgcggcgcagaagaaacccgcggcgaccacagccaaagcgggcgtgagtacgggcctgaggcgggctcccagggcggttcccggggggactgccggcagcccggcgctcggaggggcctrggggtgggcggcgccggtcagggtgacagttgtcgggggagaagtgtggtcgaggacgagtaaaatggaagctctcgggatcggaggtgcgggtcggatcgctgagctgaggctggccgggagaggactaagcatttggtcaccacctacttttacgcaagaggaaatcgaagcccgccacagcggagtgcggtctggggccaagccgcggctgttcggccgcccgcacgaccccccactccctggccgatcgatcgcccaggctcctgccctaggttcgcatcaacctggaggcaacacgcatcccctgactgctttctgtctgcgccataaacgttgggggggagggggcacagggacagacaggttgtaattcaggttctctgacctccattaacgatccagaggagttccgtaataacagcgcagtgaataataccaggttgcataatgtggagggatgaagaccaacatttcatgtacgccccccgcttccaagcctcrtcataaccctttgagaatgcgtagttgtgctatctctttgacagatgaagaaacggattcaaaaaggtaaacagtaaggggtagatctaaaattggaactcagattgcctgcctcctaaatcgttccctttctatgccgtcatgctgcagttacaagcagtgtctataggggaagtttggaaggaaggagggtcctcttgaaagaagtgctgcttctaggtctgaagtgcagtgacggtttttgcagggcagagttaaagctgagcagttactcccctcccatccacctccccaccccagctgctgaaagaggcctaggtggaggggtttcagcattcacagaaggttgaagaagtcggggaagctcgctagtaaatttagttaaggcagcaagtaatatatagctggactgaaggtgttggagtgagtgagggtaggcatggagtaggaaaaataggacctgagagaaggttgggaacttgggaatgagaatgagaggctcaggggaaatgtgtggtggaagtgacaatgtaatcctcttcagttcagcagacgatttcagggtcttgtattaagtcttctattaagatcttgtatttagataactatataaaattagttgccagtatcttttgtgggcatcccattctggttgctactctactgaggggaatgggttaaaaactacactcccttcagtctctgaaattgtgattctgaattgaaaagacaagtaatttcctgactttaaagatttgtttctcagtcatctgccaggaattggcagagacctggagaggccaaacacttctgcactggaattggttacttgacttaacctgtgttcagaaaatgtgtttcaatactgattgattatttatgtccagggtaacactagatcctgtgaacataatgatacgtactgatatattgaatactggttaaatacataggctcttttttttttcttcgagacagagtctcactctctcatccaggctggagtgcactggtgtgatctcggctcaccgcaacctcaacctccacctcccgggttcaagcagttctcctgcctcagcctcccaagtagctgggattacagacatacaccaccacgctgggctaatttttgtatttttagtagagacagggtttctgtatgttggccaggctggtctcgaactccgacctcaggtgatccacttgcctcagcctcccaaaatgctgggattacagaattgagccaccctgcttggccaaatacatagactcttaagaaaactgttaattatgaatttcagtttcagcttctcaggtttaccaataatcatcaggtttctacacttgttaaatgggatgatacccaccacattggtagtgaggattaaatgtgatcatgtatgtaaggagattaattgaacagttagcatatggttaggattcagtcattgtcagctattaagaccatcgtcagttttagttaatggccactccgtttttttttttcagttcctcaggaaaaaaaaccttaggttgttgttgactcctcacatccagtgcattagcaaattctgttggctccactttcaaaatatattccaagtctgaccactttatatgtcctccagtgttgccatgctggttcaagccataatctctttcctggattatttatttatttattattttgagacagaatcttgctctgtcacccaggctggagtgcagtgacgtgatctcggcttgctgcagtttccgcctcccgggttcaagtgactctcctgcctcagccttccaagtagctgggattacaggcatgcgccaccacgcctacctaatttttgtgtttttggtggagacggtgtttcactgttttggccagtctgatctcaaactcccggtctcaggtgatcggcccacctcagcctcccgaagtgctgggattacaggcatgaaccaccgcgcctgaccatctttcctggattataatagattcttgattggcctccttcccgttttccactgtttgatatatatattatgccccaccttccctcaacagtcagttctctttatttatgcatttatttatttttgagacagagtcttgctctgtcacccaggttagagtgcagtggcaccaacgtggctcactgcagcctcaacctcccaggatcaagtgattctccacctcagccttctaagtagctggaactacaggggctcgccaccacacccagctcatttttaagttttttgtagcaatggagtctcactatgttgctcaggctggtctcgaactcctggactcaagcaatccttcagtttcagcttcccaaattgctgggattaaaggtgtgaaccaccacgccccaccaatagtcagttcttaatgcagtgaatctttttttttttttttttgagatggagtttcgctctgtcacccaggctggagtgcagtggcccaatctcggctcactgcaagctccacctcccgggttcacgccattctcctgcttcagcctcccggagtagctgggactacaggcgcccgccaacacgcctggctaattttttgtattttcagtagagacaaggtttcaccgtgttggccagggtggtctcgatctcctgacttcatgatccgccctcctcggcctcccaaagtgctgggattagaggcgtgagccaccgcgcccagcaaatgcagtgaatcttttaaaaagtcaaaacagttgatcacttaaaaccctcttgagactccctatctaagtaaaagtctgtaagtttggaagcagccctaagcatccctgcatcctttataatgacatctttttctacccctttacaaaacgcactctattccagccacactggcatagctgcttctttaataccagggcctttccatttggtatacctctgctggaaatactcttccccttgatatctgcatgacccattcttttaacttttttttttttttacattattttaaactaaaaaacaaaacctcaggaattatagtactttagtgtggtccagaaattgtacaaataaataactcagtccttacaaccttatgaggtaggtaagattttttttttatgagaaaactgatgcacagagacttaaataaattgcccaaattcaccttatagtaagctgtgtgactatgattcaaatttaggagtctgtctacctcaagtctttgctaaaatttcacctttgcaatgatgtttaccataagcaccatatttaaaattacaaaccactctcctgacatgcctctcctagcacttgtcaccttccaacattttctgtacttttctatttttaagtatttttctctcttccccaatcagaatgtaactgcacggggacttggattttgactttttttttggcaatgttatcccagcacttagaacagaacctagcaggaagtaagtgtatattaaatatttgttgttgattgttcttactctaaagagatacaagtctagcagaggagacctaacagcaatatacagagactatttgccataaatcccgtatttgtggtatatggtggttgagcaattagaatgcactctgctggatgttgtagggtagaaaggatccccctcaacccccaccacagttcccagcaggcattatacctttttgagacaaagttctcctcccttttatacatcaaggtgtctgtgtagaccaaattataatcacagtgttacataatgagcatgggattggattaaaataaatcggtggtctttaggggtaatgtattcatactgacaagcccatcagtaccaaaaatgaaacatgcctctgtaattggaatattttctgatttgggggctttacattcaatacatttggttggattacaccttgctgttttacatcaatcatgcatttcagagacttcactccctgatcaccctgattatatttggatatttyttagtttcctcagccacatatttattgacagagcatttyttaggctaggctgcttttatgggtggttacatttattcatttaattcattaacttgaatttttcctagtctaatctcaggctgacctttttttttttttttttttttttttcaaaacttctcattacctctgatcaggctgatcttatcttcaagttctgaagttacttttagtcacctatttattaactacattgtatttttatattttgaatatgttctcattcagctgggcttatagatttgtgtttttgttttttcctgacttgtatgggttccctgaatattgtggtggtggtggtctaagtttgttttttgttgtttttttaaaacttctattttcatcctaccaactttatgactatggatatcttttctgtagtttctttttcttccagaatcagagtagccattgtctatttctgtactttctttgttttctaaggtctgaggttctttggtttctgtaaatttagggttgtttctcatgttgaagagtcacttaaggatggatagtagggtgttttttttaaattgatgatgatcgtacattacttttgggttttttttttcttttgagactgtgttttgcttttgtcgcccaggctagaatgcagtggcgcaatctctgctcactgcaacctctgcctcgtggattcaagcaattctcctgcctcagcctccggagtagctgtaagcgccttccaattacaggcgcctgccaccatgcccagctaatttttgtatttttagtagagacggggtatcaaactcctgacctcaggtgatccacctgccttggcctcccaaagtctgggattacaggcgtgagccactgcgcctggcctacttttgggttgtttacctacatttttacttttctgtgtgttaggtaaaatagaacattctgcagtatgtagaaggtactattttaaaaattgtatgtttatttgaaagtctggaaagatactcaaaactcaacaccaatatgtgtaacatacaggagattttaaaaacttaaagcataacacagtacagaaacatgaaaagtatatagcttaatgaagtatcacaaagcatagatagggagcttctgggtgtggcagtgaatggtgttccctggaattgggtgacatggcagttctgtattcagtcataagcaagaaagggcccttgattttaggtttagaggttacagctttatgtgggagacagtgaagagctagaacagggatctgatgagacagtgtttcggatggattatagttaacaaaaacctagagctaagaagaccagttaaaagattataatggtagtctgggtgccagtggctcatgcctgtaatcctagcactttgtttgggaggccgaggcaggcatatcaccggcacatcagaagttcaagaccaccctggctaacacggtgaaaccccatttctactaaaaatacaaaaaaaaaaaaaaaaattagccgggcgtggtagcaggctcctgtaatcccagctactttagaggccgtggcaggagaatggcgtgaacccaggaggcggagcttgcagtgagccaagatcgcgccactgcacttcagcgtgggcgacagggcgagactctgtgtcaaaaaaaaaaaagagagagaagaaaacagcaaagcacaaaaagaattaaggaggtctgaagcaatgcctgtattttaaaggtgagaagttgaatcatggaactaagagtattaagtaaaccaagggaccgaagcattttaagaaagtactggccaggcacagtggctcacacttctaatcccagcactttgggaggccaaggtgagaggatcacctgaaaccagaagttcgagaccagcctgagcaacatagtgagaccacccccccgcccccaccatctctaaaataaaaaataaaaattggctgggcatggtggctcacacctgtaatcccagcagtttaggaggccgaggcaggtggataacttgagccgaggagttcaagaccagcctgggcaatgtggtgaaaccctgtctctacaaaaaccagctaggtgtggtggtgcctgcctctagtcccagctactcaggaggctgagagagagaatcgcttgaacccaggaggcagaggttgcagtgagctgagatcgtgctgctacactcactgcaccccagcctgggcgacagagcaagactccgtctcaaaataataaaataaaataagataaaatacataatcagtagccaggcgtggtggcacatgcctgtagccccagctactaccggggaggctgaggcaggaggatctcttgagctcaggaagttgaggctgcagtgagccatgattgtgccactgtactccagcctgggtgaaggagcaagatcctatctctaaaaataaataaagaaggtagtgatcagttctgtagaattcagtgaggtagagaaaaggctattggatgtagctattgggagacagttgtgaatgtactgaaagagctgtggaggtagaaactaagttggagtttaccgagtagatggtgaagtggtttaaactcatgtttaaagacaaaactaaggaaggatatcacaactatagtgatataacatgtatatcatgtattagaatatactgttgtttaagttttcagggagccctaaatttgtgttgagtacatcctatttcaacctcatttgttgatatttgaattgactcaaacaactgacctcccccccaaacatgctttttaaaaaatgaatttaaagcttgaataagcttggtcttctgtgaaaaataacatagaatatttttattatgcaactgtgtatactttaggaaaacttttttgttattttattgctgctttttctctatgttaacttactgattctgcaaggttgtgagaaacttaaaatttaacaaaatactaacatttcctctcttaaaacttcacttttaaagaactataagtgctctcaatatttaagtagattttagccaaagaataaatgagaatattacatctctaggttaaaatttcagactaagtttgttttctctttgttttttagtttttaggaatttttttctggtaatacatgtgaaaatgtgaaaaatagaaagtgaaagtccccatctctgtcatccaatgttaattactgttaacagtgttgaacttacctcttgggaattagatgacttcggtttaatacctgtgctagtcttccttaggaaagaagatatacacaagataattcatctagagatatttataacatcagaaaaaattgcaggcaacctaaatataatacattcagcaatttgttaaatagattcatgtaatggctgaaatactattcattcattaaatttttagagtaatatttaatgacatgaaaaaatattgatattactagaaaaaacttataaaacatatagtattatctcagttttaaaatcatgtaaatatgtttgcataggaaaaaaatggtttttgcaccaagagattaaaagaggttgtctgtgagtggctgaaattaagggtgacattttcatttttccagtaataatgggcatgtattgcctttatttttatattgcttttgttagaactgtttttgaaagatgcatttaaaaattttttagtgtatactctatatagaggactcccacataatttttttttttttttgcccacattgttgagtctttcttgctgcctagtacttatttggagagaatgacaagccgttcactatgcamatcaaagattctcttataccacttataagattgtcttccaagtttcttaggaaatgttttttcctagtattgtccccatccaccccttttcttgttttgtaaggaaacaaaatctttttttatcctcaggaatatggtagcatttattttcttttttaatgtaccaaaatatacataacataaaattgaccgttttaaccgtttttaagcttacagttcattaagtacattcacattgttctgcaaccatcatcaccattcatctccagaactttttcatcttccagaattgaaactctgtacccattaaacacttactcccagttcctctctcctcctagtccctggcaaccactgytctactttctgtctctgaatgtgactgttctctgaatctcatattcctagactaatcatatttgtcttttatgacttgcttatttcacttagcatatcttcagagttcatccatattgtagcatgtgttaaaatttccttttttaaacaagaaggaataatattccattgtatgtaccatgttttgtttgtccgttcatctgtcagtggacacttgggttgcttccccttttgggaattgaataatgctgctgtgaacatgagtacaaatatttgtgcaagtccctgcattcgcttctttgagtgtatacccaaaagtggaattgctggatcatatagaaattttgtgtttaactttttgaggaattgccttactattttatgttaccaccagcaacacacaaggattccagtttctctacatcctcaccaacaattgctattttctcctttttttttttttttgtgagtagccatcctaatgtgtgtgaagtgttatctctgtggttttgatttgcgtttctctaatgactagtgatgttgagcatcttttcatgtgtttattggctatttgtctatctttggagaaatctctattcacatcttttgcttattttttaattggtttgcttgttttgcaaaggagttctttaaatattctggagatatatatatgtatgcgtgtatatatgtgtgtgtgtgtatgtatatataaaaccttatataccttatcagtatatgatttgcagatttttttcgtattctgtaggttgccttttcactctgttgatagtgttctttatgcataaaaggtactcattttgatgaggtctaacttacatatttttattttgttgtctgtgcttttggtgtcatccaagaaatcattgccaaatccaatgctgttttctcctaagagttcctaaattgttttttagttctttattctctcatacagttttaagttatcatctcaacttccccctcatttatttctttcaaaggatgtaatttctgtcatcttttgatgttgacattaaaaagaataaaactattatgtcagactttacctgtatccactgcagtctaaaaaccarttgatatgttttgaaacatttaaaaataataacatgagcaaactcttagcaaagtttaccttgattcttttttttctctcttttaatttgcattttcagtccacttaacccactgcattttatggtgatgtgaaatttttttctatacaagccatttatttgaaatgtctactatatgtaagacagtcagtgttagcatgctcatcaataacagtagaaaaatagaaccagtggaaacctgtatagctgtaatggtactcaaaagagaattgtatccttttaaaatgttttacacaggtgaattcaagtttggaggtacctaaataaaaatattacatatttctttaaaaacgtttatatacaattaaaatataaacaagttgtacaaagtactggttatgcaggttgtagacaacacttgaatgggacatgaaatcagtttaagaaaaatgtctgagccttagtgggcttctgagcgccaagaaataaaatgtttgtgggtagagttgttagaattaatgctctgtcaatcaaaacaagaacatattatctacttggatttgaaatgataaaacttagaaagtaagattttaaaaaattgtttcgctaatctttgtatcgttccaattttgtgagcaagaaaagtaagattttaggagatctcacatggttgaagttcccttacccacccaattagttcatgtgtctgtggatgtatcatagttattgctaaagacagtgttctcttgaaaatgccttgcatgggcctggcacatgggtgcttattacatactcttgctttcttgcctctgggttggggaggcactgcactgcaaagggagcccctccattctgaagacattgctaggggagagtctggacttctacctgtgaccagagtgaagggaaaattcttgccttgtcagagatggatcaatgaccatgaaaaatctaccctgtgatctttttcagtctaagcattaaaagctcctaaagcaaaacaaacaaacaaaaaatcaagactgtgtttttgtgtatcggttgcattgtttttataaatgtaagtattgttcatataaataagtagacagtaataaaaggagttatgcttagcagtgccacccagtttttttttgttatacatcaaaagtcacttgccaaaaatgatttttaatgttcttttagctttattaggtctcctttcaattttattgaaagcagagaattgaaaaccacctaataagggaaagtatttgttgcctttctttagtcattcagtttttttctttctttctttttttttttttttgagacggagtctcgctctgtcaccaggctgcagtgcagtggcatgatctcagctcactgcaacctctgcctcccaggttcgagcaattctcctgcctcagcctcccaagtagctgggattacaggcacgtgctaccacacccagctaattttgtatttttagtaaagacgtgatttcaccatgttagccacaatggtctctatctcttgacctcatgagcccctcgcctcagcctcccaaagtgttgggattacaggcgtgagctaccacgcctggcctagtcattcagtttctttttttttttttgagactgaattttgctcttattgcccaggctggagtgcaatggcacgatcccggctcaccgcaacctccgcctcctgggttctagtgattctcctgcctcagcctcccaagttgctgggattacaggcatgcgccacctcgcccggctgattttttgtatttttagtagagacagggtttctccatgttggtcaggctggtctcgaactcccaatctcaggtgatccgccagcctcggcctcccaaagtcctgggattacaggcatgagccaccatgcccggctgtcattcaatttcttaacacctacaccagtgtttttctttggctttatgaaagtttttaataccttgaagtgtctgcaatagtgaaattcagaatgggtgagagatagaactttttttttttatttaattttgtttacttttaaaattatattttaagttctgggatacatgtgcagaatgtgcaggtttgttacataggtatatatgtgccatggtggtttgctgcacccatcaacctgtcatctacgttaggtatttctcctaatgctatccctcctcatgccccccactccccgaaaggccctggtgtatggtgttcccctctctgtgtccatgtgttctcattgttcaactcccacttatgagtgagaacatgcagtgtttggttttctgttcctgtgttagtttgctgagaatgatggcttccagcttcatccatgtccctgcaaatgacatgaactcatcctttttatggctgcatagtatttctatggtatatatgtgccacattttctttatccagtctatcattgatgggcatttgggttggttccaagtctttgttattgcaaatagtgctgcagtgaacatgtgtgtgcatgtgtttttatagtagaatgatttataatcccttgggtatatacacaataatgggattgctgggtcaaatggtatttctggttctagatccttgaggaatcgccacactgtcttccacaatggttgaactaatttacactcctaactgtgtaaaattgtgcctatttctccacctcctctccagcatctgttgtttcttgactttttaatgatcaccattctaactggtgtgagctggtatctcattgtggttttagaactttcttttttaaaatggagaagggcaaatgaatgggatggcttgtgccttttcaggctgatcagttttaagaaaaagtacatatgaaagttgataatttggaaacagattccatttaaatattccttggaaaatgaaagtcttatacactacactgatctaagatgtaaatatttgtcttaaaaataatacaccacccaaggtgtaagtattcttttttcaaacatcctcaaatataggtacattgataaagatggtgacaaatcttacacatcatttaatatttttgaagtacctgtctaatttttacacaaattattgtggtataaatatcctttttattgtgaaccaaccaaatattttgctcaaatcaaaaataaatgccctgataaaacaacattcgacaatagagtaaagccagcctgggatgtgatccaaggactcaaatgtttggtgtttttttcctaaatcactgcccgtttttctaaactgatcagttttcagagtagtagggcatagaattatagagttgttaggaacctttgactttgatttctrtctttggtttgtttgtttgtttgtttgkgatggagtcttgctgtgtcgcccaggctggagtgcagtggcacgatctctgctcactgcaacctccacctcctaggttcaagcgattctcttgcctcagcctcccaagtagctgggattacatgcacgcaccaccaggcccagctcatttttgtattttagtagagacggggtttcacaatgttggccatggccaggctggtctcaagctcctgacctcaagtgatccgcccacctcaacctcccaaagtgctgggattacaggcatgagcaacagtgcctggccctatctttttttgtttgttttgttttgtttgtattttagatacctttgacttctaatgtgaaaatactctatatgatctcagagcggtgtatgaactttggaatactttatgacagaacctctagctcataaagcagcccattaacttagcctctagtctatttattgtactaaaatgaagttacataaagctgtatggtttttacaacagattaacatacttaaacagttttgttttgttttgttttgttttgttttgtggcagggtctcactctgttgcccaggctggagtgcagtggcgcgatcacgggtcactgcaacctccacctcccaggctcaaatcatcctcccatttcagcctaccaagtaactgggaccacaggtgtgctccaccatgcctggctaatttttttgcaattttagtagagatggggttttgccacgttgcccatgttgttctggaacttgtgagctcaaagcaatccacctgcctaggtctcccaaaatgctaggattgcaggcataagccaccatgcccgggccctaaacagttttttaattcagctgttgcattagctgggttaaaactgggcaaaatatacagtaataactctttttcattgtttaagccaaaattataattctgatggaccagttattttgaggttgctgctggtggttaggtgacagtattttggtgagtctgtatctttcttaggtctttctaacttctatagccttaaaataaatgagtacctactataataaactattgcaacttttcgtcagtggtggaaaacttcactgtctagactactttttataaagtggttatgaactacttgttatgaactataaaccagtaaatcttatattagctgcttcatagacattgctgatatttgtttatcatgaaatggtttttctagatactaacttgtagtttcttggggagatacaaaatgattctgcacaaaaagcagtttttactaacttgtaatcagagaatactctttggaggaatttaaatkggagttttgtaaagaaaaacttagatggctttcttaatttttcttaaaggatgggtcatcagttaaggaagttgaaacctaccaccggacacgtgctttaagatctttgagaaaagatgcacagaattcttcagattctagttttgagaagaatgtggaaataacggagcaacttgctaatggcaggcattttacaaggtaatacaaggtggttgaacactaattcaaaatagttttaaagcagtaatttaggatttgctttaatttttgaagtgtatttttgactggtcatcaaggttctagggctataaaatgtagtttatttgaaaataaatgatcacaagtgagtatgactaaattaaaaattaatacgtggccaggcacggtggctcacacctgtaatcccagcactttgggaggccgaggcagacagatcacctgaggtcaggagttcaagaccagcctgaccaacatggagaaaccccgtctctactaaaaatacaaataattagccgggtgtagtggcgggcgcctgtaatcccagctactcgggaggctgaggcaggagaatggcgtgaacccaggaggcggagcttgcagtgagctgagatcgcgccactgcacttcagcctgggcgacagagcgagactgtctcaaaaaaatatatacaaaattagctgggcatggtggcgcatgcctgtaatcccagctactcaggaggctgaggcaggataatcacttgaacccaggaggtggaggttgcagtgagcggagatcatgccattgcattccagcctggacaacaagagcgaaactcagtctcaaaaaaaaaaaaaaaataataataataataatacgtggccgggcgcaatggctcacacctgtaatcccagcactttgggagaccgaggcaggcagatcacgaggtcaggagtttgagaccagccgggccaatatggtgaaaccccatctctactaaaaataaaatttaaaaaatatagctgggcatagtggcatgcacctgaggtcccagctactcgggaggctgaggcagaagaatcacttgaacctgggaggcagagattgcagtgaggcaagatcgtgccactgtactctagcctgggcaacaaaacaagactccatctccaaaaaaaaaaaaaaaattagtatgtacacattcatgcttttattattcaaagatgatacctgtgatacatatgagtacagctaacaaggttagctgacgtaggatcagttctcaggtatttgagtatctaaagagaccttttgtgactataacttagcttgtggtttatggctccacttcatagtctatacaaagccttcattcataatcgtagttctgtttctgattgcttgctataaagttttttatcaattctgagtcatttatgaatttctatgtgttggtgttggtgtatttctaaagcagtctgtacatacggttttttggtttttagaagaggaggcatgaaacccattttaaactcaagaaatcaattttaatggattaggtaktttggctaaattcatggaactggaatatctttggttcagggcgaaaaaccccaattagggtaaaatttgtttgatgaaataattgttttggctgggcactgtggctcacacctgtaatcctaccactttgggaggccaaggcagaaggatcacttcggtcggggagtttgataccagcctgggcaacataacgagaccctctctctacaaaaaataaaaataaaaaaattatctgggcatggtgtcgcacacctgtagtcccagctactgtggaggctgaggcaggaggatcacttgagctggggaggtcaaggctgcagtgagctataatcatgccactgagagtgagaccctgtttcaaaaaaaaaaaagaatcgtttttacattacttcttctcataaataaacaatttgtaatgacttagaagactgaaatcctcctgctcttaaatggaattttgattttttttttttttttttttttttttgagacacagtcttgctctgttgcccatgctggaatgcagtggcatgatctcagcttactgcaacctccgcctcccaggttcaagcgatcctcctgcctcagctcacctagtaactgggattacaggcacgcaccaccatgcccagctaatttttgtatttttagtagagatggggtttcgccatgttggccaggctggtctcgaactcctgacttcaggtgatccacccacctcagcctcccacagtgctgggattacaggtgtgagctactgcgctggcctggaattttgattctcttattttgtataccatattttctagataagcaaggttatgcccttttgagtttttaatttttttctcagctatttcatcattcttttaatacatattttttaatttgcgtcttatccattatttatggagtgttttatactgtattttatgaaatccatagtatcagcaattacatgacaatgtttatgggacactaaaaaagaaaatcactgacagtaaactgtgaggtgccatcagtaagacacattccaatttcagagatgttaaaatggggagaaacgtacaacttttagaattgatgaagtacaatataaaccagcctgatatttctgaaatttgaagtcttaaggtttattcttctgaggtaaggtagtggtccattaactgtctctgagaacttaaaattgtttttgacgatctgaagaaaaaaataagcattttaggacccctaaattgttaccttatagagaattgccataaaatttgaggccatacatttgtgtttacagttgaattggcatcaagtagtactactttagttatcttagattaatgagataagaacagaatcagacctgaatacataaatgatgcatctgcttctgtatgaaaggcaatatgatgtggtagcatgacatactatttaaatgaatgtttggcacatttccaataaagagaagtggatgagttgccccatcgtggtacacagcagtatatatagcaattatggtacacaacatgccaaactcgagagaaactgatagcagtcaataccacattcatacaccaaatggttatttcattttagcaaaaccccttattacattaatatttattgatggttttatagttttatttgtataaaacttatagatgaacttctatttagtttggtttacatagtcatacaaaaaaattaatgttggaagtcctgtttttacctttaaaaggatctgtacattattcaagtttataaaacattgtttggctttatgttagaaaggtcttaagggagtataataaaataaatgctttcgatctggatttaaagaggaatgacttggtatttttaattagattatttctaaaatatattgaatttctatcctttttattaattctttttttctttttgagaatattgccttgctctgtcacccaggctggagtgtagtggcatgatcatggctcacagtagcctcaaccccccaggctcaagtgatccagtggtcctcccacctcagcctcccaagtagctgggactgcaagtttgcaccaccacacctggctcttttttttttttttttttttttttttttgagacggagtctcactctttttgcccaggctggagtgcagtggcgcaatcgtggctcactgcaacctccgccccctggcttcaagtgattctcctgcctcagcctctgagtagctgggattacaggcatgccctaccacacccagctaatttttgtatttttaggaggataggatttcaccatgttggccagactggtgtagaactcctgacctcaagtgatctgcctgccttggcctcccaaagtgctgggattacaggcgtgagccaccacaccctgcctcattgttaaattttttgtagagatggagtctcaccatgttacccaggcttgtcttgaacttttttggactctagcaatccccctgcctcagcctcccaaagtgctgggattacaggtgctagccacagtgcctggccatattaattatttcttaataacagtttattgagatataatttatacaccatacaattcacaattctaaagtgtacaattccatggttttagtgtgtgtgtgtgtgtgtgtattttttttgagatggagtcttgctctgttgaccagactggagttcagtcttggctcactgcaacctctgcctcccaggttcaagcaattctcctaactcagcctcctgagtagctgggattacagtcatgtgccaccatgcccagcttttttttttagacagagttttgctcttgtcgcccaggctggagtgcaatggcacaatctcggctcactgcaacctctgcctcccaggtccaagagattctcctcccccagcctcccgagtagctgggattacaggcaaccgccaccacatccagctaatttttctatttttagtagagacaggatgagaccatgttggtcaggctggtctcgaactcctgacctcaggcaatctgcccgtctaggcctcccaaagtgttgggattacaggcatgagctactgcacccagcctaatttttttttttattttgagacggagtcttgctctgtcgcccaggctggaatgcagtggctcaatcttggctcactgccaccttcgcctcccaggttcaagcagttctctgcctcagcctcccgagtagctgggattacaggtgcccgccaccacgcccagccaatttttgtacttttagtagagacggggtctcaccatcttggccaggctggtcttgaactcttgaccttgtgatccacctgtctgagcccccaaagtgctgggattacaggcataagccactgcacccagccactaatttttgtatttttagtagatatggagtttcaccatgttggccaggctggtcttgaactcctgatctcaggtgattcacccgtcttgacctcccaaaatgctggaattacagcgtgagccactgcggctggctcagtacttcttattgttgaataagagtcaattgtattgatataccatgttttgtttattcattcattggttggtgagcatttggattgtctactttttggccattatgaataatgatatgaatgtaggtatacacatttttatgtggaggtaggtgttagttcttttgggtatacacctggcagtggaattgctgagtcaaatactaacactaacattttgaggaagtagcatacttttccaaaacatttacagcattttacattcctaccaccaatgtatgagggtctctacatcctcaccaacacttgtcatagtctgcctttttggtgttcgccattttaacaggtgtgaagtatctcactgtggttctgatttacctttccctgatggctaataatgttgagcatcattttatgtgcttattggccatttgtatgtcttctgtcaagaagatttcctgtacaaaaatcctctccctacattcaggtcattattacaaatagtgatgattattttacgtaatggtaacatcagtgtctgtttgcataaggcttatataaaagagcctacagtatttctgagtcctttttcatatacttttcctgtttctttttcactgttgtcagcatgcctgactatagaaatctctttatttccttcctttccattcttttttttactctttgttttcaatctacttgaggctcaaagaccagaggatcaagattgttagaaaaagacagaaagatatgagtaactgtgtcatgagggtacgatctacatacttacttacttgatcctggggttcttaactagggtccagtgattaggtatagtcttcgcagagtgtacacaaaacctctgaagtaatgtttaaacttgcgtataccgtagctttcatcagatttgcagcggttgacaaactccagctgcatatttttgtaaatagtttccttggaacactgccatgcccattcattttgtatgtggctcctttcaccctataatgttaggtagctgtgacagaggagactgtatggcttccaagcttaaaatatttagtgcatagcaattgaaggaaaagtttaccaacccttggaaggttgctttcctcctgcaggcaaaaagaagacagtaggggtgggtggttcagaaaaatagtgctttagtcattctgttcctagcatctgaaaggggcctggtttataaaatgtatagacctacatggtatgaagggaggagctcctttatgagaaaagtctgtgagcctttgaagaaactaagcctttacctgtagatgaactactcaaaagtttgtttgtttgtttgtttttgagatggaccctgtgctctgtcacccgggctggaatgtagtggtgcaatcttggctcagtgcagccactgcctcccaggttcaagtgattctcctgcctcaggctcttgagtaggtgggactacaggcacctgactggttttggttttgtttgcttgtttgtttgtttgtttttaactagagatggagtttcaccatgttggccaggctggtcttgaactcttggcctcccaaagtgctgggattacaggcatgagccactgtgcccagccaaaagtttttattttcttcttaattcttacctgtcttccaagagagatgaggaattaatgaagacttactttgttaatgagaatatataagttaactcatcagggaaagatggttttattttactttaagttgtaatatttgaaattccacatataaaccagcccacttgcaaatagcttgatacataggttgattaacagatgcagcctaaggatggaaaattgagtcactaaaaacaaattaatggcacatactgttttgcttagtagattttttttttttttttttttttgaggcgaggtgtcactctgttgcccaggctggagtgcagtggcgggatctcggctcactgcaagctccgcctcctgggttcacgccattctcctgcctcagccttctgagtatctgggactacaggcgcctgccaccatgcctggctaatttttttgtatttgtagtagagacggggtttcaccctgttagccaggatggtctcgatttcctgacctcatgatccacccgtctcaacctcccaaagtgctgagattacaggtgtgaactactgtgcctggcctatttttttcagtatattttaagtttttaggtatcttagtatttgttctccaggctgatttaactttttgtcttgtttgtagtattatagaatataagaaatacagttatgtcttgtttgtagtatcatggaatataagaaatagttatgtcagttatagccaggtatggtggctcatacctataatcctagcactttgggaggctaaggtgggagaactggagaactgcttgaggccaggagttcaagaccaacctggacaaaaaagcgagaccccccccgccccatctctacaaaaaaatgttaaaagttagcggccaggcgtggtgcctcaagcctgtaatcccagcactttgggaggctgaggtgggcagatcatgaggtcaggagatcgagaccatcctggctaacatggtgaaacctcgtctctactaaaaatccaaaaaattagccgggcgagatgacaggagcctatagtcccaactattcgggaagctgaggcaggagaatggcgtgaacccaggagggggagcttgcagtgagccgagatcgcgccactgcactccagcctgggcgacagagcaagactccgtctcaaaaaaaaaaaaaaaaaagttagctggatgtagtgaggtgtgtagttctacctactggggaggctgaggtgggaggtattgcttgagcccagcagtttgaggctgtagtgagtcatgattgtgccactgcactcctgttggacgatggagtgcaatcccatctaaataaataaaaataaagttatgtcaattattttgaattaatctaattttttaaaatataggcagttggccagacagcaggctgataaaaaaaaagaagagcacagagaaggtaagtactgttaaagtcatttcagatcttaaaatgtgtaattaatattctgtttacaggttttttgaggtacctacaataaattttacatgtttaaagtgtataatttgttaggttttaacgtaagtatatgccatgaagccatcaccacaataagatagtgaaggtaattattacccccaaaaacttccccgggccgttttataattcctcctggctcttctagcttctctcctcactctttgacactactccccaccagtttcctgagcaaataatttcattggaacatagccgtgaccattcattttagaatctgttctctgttattatagcttagtgtgtattatctacagttttatataaatggaatcatacagtatttattctttgtttggcttcttgcaactcatcataattgctttgagaatccatgtggtcacttttttgttgatgagtagtattccattatatggatataccacaatttatctcttcaccttttgatggacttgggttgtttctggtttggggctatcacaaagctgctttgaacattcatgtacaagtctttgtattacatatctttcctcttctcctgggagtaggtgggctcaatcttatggtaggtgtatgttttaactttatttttgttttctgatgtttttaagaaagctaagtttaagatactgtaattttgttacatgaaagtatagcttttcaattgttcattttagaattgttttataaatactattatttcaaatgtttctatttatttttatgtatgcatttgtgaagacaaagtgattccagttactcggtcattgagggctagaaacatcgttcaaagtacagaacacttacatgaagataatggtgatgttgaagtgcgtcgaagttgtaggattagaagtcgttatagtggtgtaaaccagtccatgctgtttgacaaacttataactaagtaagtaaaaattccttagatcaagatgatttatctgtcagagacwttttgttggggaggaatcatggatttcaaccagcccaaacatttaatgcattctactacgtaaagcgtacaggagaatgattatcagaggtctttgtgacaattctgtatatgtctctattcttggaaagaaattttaaaatatttttatacaagtaaatcaatgcttcttataaaaatatttaaaaccttagtgccaaaagtttgcaatggaagaaaaataaagtttttaaaattctgctactcttttacaattttcacttacatttatatcttttttttaaagcactgctgaagctgtacttcaaaaaatggatgacatgaagaagatgcgtagacagcgaatgagagaacttgaagacttgggagtgtttaatgaaacagaagaagtaaatatattcttccattaagggaatgatttaatatccagtttaatttttttatagtacctaatccatttttcattaaatatctactttttccagcatttatttgatcagtcattagttactgctggaaatgtaagagtttatggctgtaaatatcttaattttaaacaagattggaggatccaacttaatttttttaataaatagattccaaatgttaatggcttttatttaaacatttttagagcaatcttaatatgtacacaagaggaaaacagaaagatattcaaagaactgatgaagaaacaactgataatcaagaaggcagtgtgggttagtctcttctcttgttctgtcttctgggattgaatttaagaactttttatttagtagaaaatagcctttttagctagaaggtgtgacatttatggtagtttgtgagagatcagaggattggtaacttaaaagtggggaaaggggagagcttaagaggatagtatgttttgtttgggaaagtaactgaaatcaacaatctaaagccaataatattggtctgcttatgtaatacatccactatggacaacacactgtatatctcttttttagtttaaaggtgattaaagttatgttttgctattccatttaggacttaattaccataatctattagaacttatcttaagtgaaaatcagttttctgaaatgcattttaaatgtttggtgagcatgttttaccataatcataagtagattgagttatgcagcgtgtaactccatgacagccagatgggctgggtgaaatgtcaaacttaagtttagaaagcaaaagcttaatgaggaaatttgaaaacttgtcaaaaagttatgttaacttggaagcttaagtttagtcacctacattaatgaaattcatggaaagactataaattttagtttggtgcttgcttaacagtagccttcaaacttctttctctacttccttttttccttccttgtgtttttctgcagttttttaatgttggaaaagaattacaaatacttcccatgaacaatctaggagtagataagtttggtttttttttgttgtttttttttttttaggagtagataagttttaaaagggtggatctttctctcccaactcacctatgttaaaaattgttaacattttgctgagtatctttctggaagtaaggatctcttaattgtagagtcatctgaagagggtgaagaccaagaacatgaagatgatggtgaagatgaagatgatgaagatgatgatgatgatgacgatgatgatgatgatgatgatgatgaagatgatgaagatgaagaagatggagaagaagagaatcagaagcgatattatcttagacagagaaaagctactgtttactatcaggctccattggaaagtaagtgctatacatactctttccaggagatgtaattatattagctttatatttcctgtttcttctctgttattcttgtctttttggtatttttcatattttcattttgttgaatactcattactgttgtctttacctatcctaagtttgtaacaaataatttctctgaagaaagttaaatgtttgccttgaccaaagcaaataactgggctatttttgaattttatatctgtctttactttagactgcacagctttctacttaatttattttgtcagtttgtatagagataggacttcttttgatttatgttaatattataccacagtacttgtgagcattaatatacaaggctgataatcaacctgttacacatctctacagtcacaatggttgtttatggcctgtgtgtgttttggttggttggtatctgtgctatacatgttatcagctgcaaccctctggacataaatgacttaaaatatgaacagcaaaatattccatagtagatatttactagtacttcatggaaggcrataagcacctttgtaagtatttagatgaagagcaaaattatcttcatacatatttgtatgccatatatatatatatatwcaaatatatatatatatttcttttttttagaacctcgtcaccagagaaagcccaacatattttatagtggcccagcttctcctgcaagaccaagataccgattatcttccgcaggaccaagaagtccttactgtaaacgaatgaacaggtttggttctgatatagtgattgatttatgacaacataattgtttttatgttagggctggactctagactttcaggattgggtgtattaggataaaattctagaattgtgtatttgggagagcttagtttctatacctttagtagtctaatccccagtaccactgactagtttttgcttttgcttccactaataggaggtgttagtaactaccgtagtaaggtagtttattccatttttccacactttaataatagagcaaccttagactcagggtttactgtagtcctggctctgtgttaagcattttacgtagattgtttcatttaatcttcacattaagttagaatataggtttagtcttttctttgcatactatcacagatgcattttcctaccatgtcagatgttctaagctacatggcctctagacctttcatgactctggttatctttttctggatctattttataatttattcctcttctgttgtaggaaacatttattttctttgactattcaatatttgtggatttcttttccttctacatcccaacagttgttcattggtcaaatttaagtccaaagagataattcttctatttttattttatttatttattttggggagggtgggggcggagcagagtcttgctgtgttccccaggccggagtgcagtggcacgatcttggcttactgcaacctctgcctcctgggttcaagcgattctcctgcttcagcctcccaagtagctgggactacaggtacctgccactacacccagctgatttttgtatttttagtagagacgggttttcaccatgttggccaggctggtctcaaactcttgacctcaagtgatccactcgcctcagcttcccaaagtgctgggattacaggtgtgtgccaccacacccggtcaaagagataattcttgatacttcctcatcaatgcattggaataatcattttggtagttcatgaatgagagagaagactaagaaaccaggaaaaaaattttatttgtatggggaatggtaatttttttcccttaatattagaattttctcagaagtaagaccgaagccttaggatatttcagttatttgaacagttcttggaagttttctcctagagacagaccatctgatcatgttttggtcatggaagcagcacctttgtaagtgctgaaggttaatttctttcaggaaaaataaaaaatactatttgtgtccctaggtcttttcatttcattgtaggaatcacaagtgtacatctagatttcttatttcatcatcctatttcacatgaccagggtccagaaggatggaggatcgggaagacaaactcagtctctcagggcttttcaagattaattgcacttgaaaggaggctgcacatcagtattctcacaggccccttagaatgtaaagacctctattttggtggtgaaatgtaatgatcttcagaaaaggagaggaaggtatagtgttccctagaatccccaccaccaccaggcacaggaccaaggcactgttatggttacctaactcaaggggtggatctctgtttgatccagcagtactaagagggtggcagctactttgggatcttatttcttctcccgttttgttttgtttaagaggaaatctcactctctcgcccaggctggagtgcagtggcgcgatctcggctcactgcaacctccgcttcctgggttcaagcgattcttctgcctcagccccccgagtagctgggatcacaggcgtctgccaccatgccccgctaatttttttgtatttttagtagagacggggttttcaccatataggccaggctggtctcaaattcctgacctcaggtgatccacccaccttggcctcccaagtggtgggattgcaggcatgagccactgcacccggccgagttattggttagattcaaagtgctggtccagtgtttgtgggtgtcagatttttaattggctttcagtaaaatggagattgggggatgagcacatgtagacagatatgtgtgtttaaatgttttttatttattttattttatttttggtttttgtttttcaaatttaggaaacattttcctatgaaaatggattatactgacttgcctcagcccctcttttcctcttttttttttaaattttttatttccgtaggtttttggggagcaggtggtatttggttacatgagtaagttcttcagtagtgatttgtgagattttggtgaacccatcacccaagcagtatacattgaacacaacttgttgtcttttatccctcactcccttcccactctttccccctgagttcccacagttcattgtgtcattcttatgcctttgcatcttcatagcttagctcccacttattagtgagaacacatggaacatacgatgtttggtttttcattcctgagttacttcacttagagtaagtctccaatctcatccaagtagttgcaaatgccattaattcattccttttgatggctgagtagtagtccactcaattgatggacatttgggttggttccacatttttgcaattgcgaattgtgctgctataaacatacgtgtggaagtatctgtttcatataataagttattttcctctgggtagatacccagtagtgggattgctggatcaaatggtagttctacttttaactctttagggaatctccacactgttttgtatagtggttgtactagtttacttttccaccagcagtgtagaagtggtcactatatacacaccaacatctattattttttgattttttgattatagccatttttgcgggggtaaggtggtatcacattgtggttttgatttgcatttccctgatcattagtgatgttgagcattttttcatatgtttgttggctatttgtatatcttcttttaagaattgtctgttcatgtccatagcccactttttgatgggattgtttttttcttgctaatttgtttgagttcgttgtagatgctagatattagtcttttgccagatgtatagattgtgaagattttctcccatactgtgggttgcctttttactctgctgattcttccttttgctgttcaaaagctctttggtttaattaagtcccacctgtttatctttgcttttattgtttttgcttttgggttcttggtcatgaaacccttgcctaagccaatgtctagaagggttttcctgatgttatcttctagaatttttatatagtttcaggtcttagatttaagtcctcgatccatcttgagttgatttttgtatcaggtgagagatgaggaaccagtttcattctcctacatgtggctacccaattatcccagcaccatctgatgaatagggtgtcctttccccactttatgtttctgtttgctttgttgaagatcagttatttgattttatttctgagttctctattctgttccatttgtctgtgtgcctgtttttatactagtactgtgctgttttggtgactatggccttatagcgtagtttgaaatcaggtaacgtaatgcttccagatttgttctttttgcttagacttgctttggctatgcaggcttttttggttccatatgaattttaggattgttttttctagttctgtgaagaatgatagctggtattttgatgggaattatgttgaatttgtagattgcttttggcaatatggtcgtttccacaattttcattctacccatccatgagcatgggatgtgcttccatttatttgtgtcatctgttatttctttcagcagtgttttgtagttttccttgtagaggtcttttgcctctttggttaggtatattcctaagtattttattttattttgcagctattgtaaaaggggttgagttcttgatttcattcttagcttggccactgttggtatatagtagacctactgctgatttgtgtacattgattttgtatcctgaaactttgctggatttttttgtcagttctaggagttttttgcagtagtctttggggttttctaggtgcacaatcatataatcagcagacagacagtttgacttcctttttactgatttggatacccttttatttttttctcttgtctgattgctgtggctaggacttccagtactatgttgaatagaagtggtgagagtgggcatccttgtctagttccagttctcagagggaatgcttttaacctttccccattcagtattacgttggctgtggatttgtcatagatggcttttattacattgaagtgtgttctttgtatgctgactttgctgagagctttaatcataaagggatgctggattttgttgaatgccttttctgcatctgttgagatgatcatgtgatttttgtttttaattctgtttatgtggtgtatcacatttattgacttgagtatgttaaaccatccctgcatccctggtatgaaacctccttgatcatagtagattatcttttttgatacgttgttggattcgattagctagtattttgttaaggattttagcatctatgttcgcagggatgttggtctatagttttcttttttggttatgtcctttcctagttttggtattagggtgatactgacttcatagaatgatttggggaggattccctctttctctaccttgtggaatagtgtttacaatgtttttaaactgaagtaatgacctttctacagtatagagtaattgctaagaacctgggcccatgactaggactgtctaggcttggagctcagctctactagttattagcggcctttggcaagttacttaactctgtttcagttttttttttatctgtaaagtgaggatagtaggacctatctcatagtattgtgagaattagatgagttaatacatgtaaagcatttaaaatagtgtctgccatacattaagtgcggtatgtatttgctattataactgtacttcgatgtttaaaaataatctccattttgcaaatcaaatgtcagaaatttcatgttggtccacaggttgtgttattgtttgcttttaactttattggtttatgaaattaaaaaactggaaatcatcagtatagtaatgtatagaatgcagattttttgaataaacatataggtttgaattctgacactatcaatgacagattctgatattttgagtaaattatttaacctggaagccacactggccctaactgtaaattgagcctactaataatccacttttccaaaattttaattaagattaaatactatatcaagtacatggtacagaaagcagtcagttaatgttagtcttttttattaattgggaggttagtctgaattctgtgactacatagtgagttcacataaaattatgtgaatacattaaagtctaatattcatggtaataatgaataagttagtttttcatataaagttgcagacttgtactggatataataattttagtttcaggctgatcacaaagatggtcttggtgtatttgggtaggtggatgggtgaaagattattttctcatttatttctgtgtttccacaaccccttatccaaaacccttggaaaaccatttgtgtttcagaattcagactttttggctggatttacagataacacacaacatatgtagtgtggcaacattaacatctctagggtctccaagccagcactgtgtggtcaaatacattaattaataattctgtagtaaaacatatgaataatcatagtaagtgggacaaaatagaaactaaaaattgccttgtactatgtcaggttatgatttgctgcaagtgaataatggaataacttccgagtttttttgatacacgtttctggaactacattatgcagataatagattgtgaaccttttgtatttttggaaatacttacttaccatcattgcactctgactcagaaaagttctagaccctgagcaagtagaataattaaagttcttcccaaccagactctttgttttttctgtgagtcttttgcaaccattcaaaggtagaagtgatwaaaaattttcttgtatatttgtaatatctggcatcttatttaatagtaccaaccagcctaagtatttgatagtatttttttcttttttgtgagcaagaaaacttatgggttgagtaactcatccacatttacacagctgttaagtgacagttgtgaatttacagtggatggtatactgttgataaaaggccatcttattcatcactgtttcccagcatttaaaaagtctttcttgatgcccttttgtttacataaaatctcatgtccttcttttaaaattgtttgatatttttggccgggcgtgatgactcacaccttaatcccagcactttgggaggctgaggcgggcggatcacaaggtcaggagttcaagaccagcctggccaacatggtgaaaccccatctctatcgaaaaaaaaaaaaagttaactgggcacaatggctcatacctgtaatcccagctgctcgggaggctgaggcaggagaattgctcaactggaacccaggaggcagaggttgcagtgagctgagatcatcccactgcactccaacctgggctatagagcgagacgaagtctcaaaaaaaaaaaaaagttatttgattttttaaagtaggtgatttcctcccaaatgtgaatattatgtatagtgtaatattgaaaatagtttcaaattacagtcccaaatactttttttttttttttttagatagaggcaggggcttactttgtcacccagcaggctgcagtgcagtggtgcaatcatggctcactacagcctcgtcctcccaggctcaagcaaatctctcacctcagcctcctgagtatctgggacaacagatgtgctacaaccatacctgtctaagctttttgatttttagtagagaccaaatcttgccaagttgctcgaatgatttttagtggagacaatgtcccgctacgttgtgcttgaacacctgtcaagtgatccttccccctcggtctcctaaagtgttgggattacaggtgtgagccaccacacccagccccaaatattctaataccctcttaatcccacctttctctttgagaataactgatttatatcaagactaagaagtcaccctgccttctcctgtctccatgaacatttgatattcagctctgccacagtctttagtcttttttcctttcctctcagttgtttaagtcttttattccatttgaaagattcagcgaacaaagtttatgtcagtgggtcagcagatgtattaattttatgataaactttttggagcattaggtatttctgatgcttttcttatgccttttctttttcctgcccttccttatcatgatttcaattttgttttttactttaggcgaaggcatgcaatccacagtagtgactcgacttcatcttcctcctctgaagatgaacagcactttgagaggcggaggaaaaggagtcgtaatagggctatcaataggtaagtgccatattgatgcctttttaaactagcagacacattttgtaaaaattgctaagaaaacagaataatttgggtataagtataggctggctgattaaaaagttgcacaacaggttaatgtataaactagaatgctgtcttgttagaattatctacagttgaatcagaataacaggttagaacatatgactgatttcttgactttttttttttttttttgagacagggcctggttctgttgcccaggctggagtacagtggcgtgatcttggctcactgcaaccaccacctcccgggttcacacgactctcctgcctcagcctcctgagtagctggggttacaggtgtgcatcaccacacctggctcatttttgtagttttaatagagatgaggtttcgccatgttggccaggctggtcttgaactactggcctcaagttatccacccgcctcagcctcccaaagctatggaattacagctgtgagccaccatgcctggcccgcttgccaaatcattatatatggcccacagtggttctggtcaaacagtgacttaaggaaataaccttttcttttcatgtattttttttttttttttgcttataataatgataagttctgaggaactcttaaggaaaacggaaggctttactcattttataactccttgtagtgtaagtccatgtatactaaccagcttatttgattttcccaataaatatttaagggagatagagcaaggattatttacattttacagatctggttgagtaagtgaaaatgcagtgcttaggtgcttggattcttttttttttcttttaatagagacaggttctcactatgtcactgagactagagtagaagctaggctggtctcgaactcctgacctcaagtgactcagctgggattaccggcatgagccaccacacctggccataactatttctgaatatttttgaaagtagttagggaacttccagcctgtccagcatggtgaaaccccgtctcgactaaaagtacaaaaattagccagatgttggtggtgcacaccagtaatcccagctactcaggaggctgaggcaggagaatagcttgaacccaggaggcgaagattgcagcgagccgagatcacaccactgcactccagcctgggcgacagggtgagactcagaaaaaacccaaaagacaaaacaaaacaacaaaaaaggaagtagttagggaacttgcttgagaggattgatcttggatccaaatgctggtagactgcgaatattttttctgggagatatcatagcagaattgttatagctctggagacagaccacttgtgtttgattcctggccctgccatttactagttgggtgatcttggacaaatcagttaatctttctatgtcttggttttgttttaaaatggggaaaataataataccttcctcataagactgttgtgaggatttatcaacttaatccacgtaaagcacctaaaactaaaacagtgtctggcaaatggtaaataccctgtctgtgttagacacctccattaaaatgtaggttagtactgtctgatttcaccaccgtgaatcactttatggtgcctgtggcatcttggtatttttatttgattatatgtctttaatttcataataaagcttcagatayaaatatttctaacacttaagttctggacctattacagaaaatgaggaaattaaaatacatatcttaagattgctccggttgaaatttagattttttttttaacttaaatgtttatattcaaacatggaatttgggaaggagggtgagttgatgggtttgtgtggttttaaaaaatctttttaaataggtgcctcccactaaattttcggaaagatgaattaaaaggcatttataaagatcgaatgaaaattggagcaagccttgccgatgttgatccaatgcaactagattcttcagtgagtactctgttttgaaacatatgcttgaactataatgtgctttgttttagttttaaagttaaaaaaaggaaccaatgatttttctttttagtcaaaactctaacctttacagacgttttctgttaatcttcaggtcacaattaagatattattacttcattgactgtgtatggtgtggggtgacattttaatctggactccaaatctaaaaatgtacatgttcgcttccattaccaggtacgatttgatagtgttggtggcctgtctaatcatatagcagctctaaaagagatggtggtgtttccattactttatccagaagtctttgaaaaatttaaaattcaacccccaaggtaatttaattatatttttaattttagctgaaaatctttgctattcttgcttcttgtagttcttataccttgcttattaacccatttttaagtgatagttcccttttcccttttcattatacaacttttctctctgaatcacctttatagaagcagtaatttaaataaacttttaaaaattagtaagctttccccccatcataaaagtaatatactgggccaggcacagtggctcatgcctgtaatcccagcactttggggggccaaggcgggtggattacctgagctcaggagtttgagaccagcctgggcaacgtggtgaaaccccgtctctactaaaatacaaaaaattagccaggcctggcggcgtgcgctgaggcacaattgcttgaacccaggaggcggaagttgcagtgagctgagattgggccaccgcattccagcctgggcgacagagcaagacaccatctccaaaaaaaaaaaaaaaaaaaaaaaaagtaatgtaccatatatcaatcacaggtaaacactggtgggttttaaattaaattttgtaatttaaaaaattagaaagtggccaggcacgatggcttatgcctgtaatcccagcactttgagaggtcaaggtaggtggatcacaaggtccggagttcaagactagcctggccaacatagtgaaaccctgtctttactaaaaatacccaaaaaattagccaggcatggtggcgggcacctgttgtcccagctactcgggaggctgaggcaggagaattgcttgaacctgggatgcggaggttgcagtgagccgagatcgcaccactgcagtccagcctgggcgacacagcaagactctgtctcaaaaaaaaaatagaaagtgccaggcatggtggctcacacctgtgattccagtgacttgggagactaagacaggaagattgctttagctcaggaatttgaggttgtagtgagctatgatcatgccactgcgctccagcctagctgacagtgagaccccatctttaaaaataagtcagaaagttattaatattaaataacatttacttcttacaggaaatgttggaagtgcctagttaaagtaatttagtaaattaaaaacaaatttcttgaattttctttcacatttcttcttccttacaatatacgttttcccccatacaaattgaattatatgattgtgatatgtgattacatatgcaaggtaagataatatgatgaacatgatgaatgaattgttaaaatgtttcaaatagagttttatttacagtttcaatattaattttacagtatcagtattaactcccaggttttaagttgtgctttgtggtgcgaaactgtaccataattcagttgtcttacacattttaattttctaattaaatgaatcatgaaattggtttctaatttttgttttaaaagtctgctttttaaatgtaatactaaaatgttaatgtattgttttrcagaggttgtttgttttatgggccacctggaactggaaagactctggttgccagagcacttgccaatgagtgcagtcaaggggataaaagagtagcatttttcatgaggaaaggtgctgattgtctaagtaaatgggtaggagaatctgaaagacagctacgattgctgtttgatcaggtatgatattaacattttatatatctggatagttctgtaatctaggcagatgtgtgtgaggattagataaatcttacatttaatcagtgttctaaataaacccagaagaattagactatttctttctagattattttcttttatatgtcgagatgacactgacctacagtgaacagttttatagtaagaagggaaagaaataattggatcttagttgtttggagtcttaggtctcatgcatataggaagagagtggtaatctcatatttagagagatagtagtagtgaattatggctcagtatgggagttaaagactatttctgccctggagcggctttcattttcatatcccagattgtattgacagcacattgtaagataatactttctgatctactgaggcatattgctgcaaatgcttttaaatctctttttggaactctcccgaggttcttttttacttttatgtttatggaaatggataaaaactgtggcatcttgctaaataatgttttcccatcctgacttggaggaagactatgtcactgtcttctattctttgtcttgtttccatagttcaataaatatttttgcgtgtccaggaacgatagctatgtgaaatctaaggtatataaccagtggagtatatcttttgaatacttctggttgaaaatgcaattgaaaattaaaccatatatcattataatttagtttgaattcttaaaaccccgttactagaacttatgtttaaatttataaattataaatagttataaattataaataaattgagactgaggcaggaaaatcacttgaacccaggaggcagaggttgcactgagccaagatcacgccactgcactccagcctgggtgacagtgagactccatctcaaaaaaaaaaaaaaattatatataaattctggtaagtaagtttgaagaaaaaccgattcaaatagtatatattcagctttataaattctgttaagcatatttgaatgagaatttattaaaatggtttatattaagtctacgtgtttgaggctgtttatgctaacaaatgaccactccacctactttctaggcctatcagatgcgcccatcaattattttttttgacgaaattgatggtctggctccagtacggtcaagcaggcaagatcagattcacaggtaaaacttgcttgatggcacttcaacgtttcttcctatttcctgagtggtattgatgtgtgagagatagaatgttaaatggtgaaagaaactttataagctagtagttcctttttttggtagtagaaccccagtatatagtacaaaaataaaaaatgtggatggktgcagtggctcatacctgtattcctggcactttgggaggccaaggcaggcagatcacttgaggtcaagagtttgagaccagcctggccaacatggtgaaatcctgtctctactwaaaaaaaaaaaaawttagccgggtgtggtggtgcaaacctaataatcccagctccgtggaaggctgaggcaggagaatcaggagaatcacttgaacccgggaggcggaggttgcagtgagctkwkattatgccactgcmctccagcctgggtgacagagcgaaactccctytcaaaaaaaaagtaaacctgctccgagtgtcagtgtgttgtaaagcatggtttaaaaatcttggttacagaagatttaactcatgatagaaacaaatgtctgcgggtcagtgatgttaagccactagtaagaggagggctatggtggggaatgtggctgaatgtcctatcacaagagcatattcagttgcttttatctctgacctgttactgatgtgcagaagcttacccagacttgaaaaatcgattttttccctcagattttatgttcaaattgtcaagtatcttaaattttaccagctaatttggatgcttttaagacattgcctgcgctaaacaaaatctaacttagggcattactactagtttaggattctaatactagaccaatctccccattttaaagatgggtaaattgaaccctcaacccccatgattagttgcttatccaagggagcacttttacaagtgctattgtcccaacctgaatctaaattgcttttagtcccaattcatttcagttttttagaacttctttttaaatggtttcatgaatgatgtgtaattgattgattaatttggaatatcctaaaggaaatatttgcatactttcatatatgctagtagtattgttttatattgtagataatgtagatgaataagatatagtgtgtgattgataggtgggttttggcttttctaacatctaacaagatttgctatattctaatggccttttaaacttgatgataaacaattttgcttattgctgtgagtaaattaaaatatatgttaagtaccatggtaaaagtagttttgtctctgcatgtcctattagtaatcagataaactttttatatgtgacgcatttcattatcagtcacactatattcattgtgctaacaggaaggaacatatttaacaatacttccatcacttcataatcaagtaagttgagtacttactgtgttttgggatacttctaaaggtattggaggaattttggcaaaaaaattacagagtaattgtagcaaaactgtgccatctcaaatatatatatatatatatatatattttttttttttttttttttttttttttgagacagagtcttgctctgttgcccaggctggaatgcaatagcgtgatcttggctcactgcaacccccatctcccaggttccagcgattcttctgcctcagcctcccaagtagttggggctacaggtgtgccccaccatgcccagctaaatttttgtattttagtagagatggggtttcaccatgttggccaggtcttgaactcctgacctcaggtgatcagcccgcctcagcctcccagagtgctgggattacagatgtgagccaccgcacccagcctgttctttgtatttttagcagacactgggtttcgccatgttggccaagctggtcctgaactcctgactttaggtgatccacccgtctctgcctcccaaagtgctgggattacaggcatgagccaccgcgcctggccaaatatagctacatttttaaaagaaatttagtattcaagttattttaaccaaaaacttaaaaattctgacagagtaaaaatgtatgttaaattaagcttttttagaatttagcacattgcatgttgaagatgattaaactgtattctgcacttaattttagtaataatactgtagaataatgcaaataagtaattatgtgaatgtcattaggtaataatattttcaacctaagagaaagaagatacaagtgtgaaataaagaagtcaaattaccctaaattgttttttttgagacaaagtcttgctctgtcgcccaggctggagtgcagtagcacagtcttggctcactgcaacctctgcctcccgagttcaagcaattctcctgcctcagcctcccgagtagctgggattacaggcatgtaccagcacacttagctaattttttgtatttttagtagagacagggtttcaccatgttggccaggctggtctcgaactcctgatctcaggtgatccacctgcctcagccttccaaagtactgggattacaggcgtgagccacccacttgacctgaaaccctgatagtctttactttgaattgcaaatatcaatagaaacttgggacagagttttttgttttgttttgttttgtttaaagaaaaaaaaaatcctaactctggacactttaaacaggcctagaagcaatcacaatccagtagcaattaatgtccatccctgagtgtggtctctaaatattaggactcaggagagatggcggattgtaacactgaagcagaaacgatcaagacaagcctggaatactttgtaatgcctgaaagcaataaaaaaaaaaaattactggaatcgtaccagaatgacataggagccaattttgagggatctctcactggctgaagatgaaacaatttgagcatcaaaaatagtgactacagtagatagaaatatatcaaatacctaaaaaaaatcacttttttatgttgttagttttttgttgttgttggttttggtttggtttgttgttgttgttgttgttgttttgtgacagagtctcactctgtcacccaggctggagtgcagtggtatgatcttggctcactgcaacctccacctcccaggttcaagctattctcgtgcctcagcctccccagtagctgggattacaggcatgtgccaccactcctggctaatttttgaacttttagtagagacggggttttgccattttggccaagctggtcttgaactcctggcctcaagagatctacctgcctcagcctcccaaagtgctgggattacaggcgtgacccaccacacaaggccttgtttttgttttttgagacagaatcttactctgttacccaggctggagtgcagtagcatgatcacaactcactgcagccttgatctcctgggctcaagcaatcttcccacctcaacttctcagaactacaggcacacactaccacactcagctgggttttggttgtttgtttgtttgttttttagtaaagatgaagtctctgttgcccaggttggtcttgaactcctgagctcaagtgatcctcccacctcaggctcccaaagtgctgggattacaggcatgagccaccatgcccagccaccatcagttttttgttgttgttgttgttgttgtttttgattttgtttttgttgtttttttttttaaaagaaaacatcttatttgtaaaaaaaaaaaaggtatgatttcttaatttctattcttggcataaattttctttccagtgcaaccaaaacttackgaaccctcttcagcactgttattcagaacttggagttctattgctggataaaaaattcattcacaaataagctgtgcaattcgatcaccttgaagttttgacttcaaacttttctttgacaaaacaccaatgtttctcctataaccttcatctaagatacccagctcctaagtgttgcagccaagccaaaatgtagagctactcttccataatacccagaaggagcagctatctgaatgtctgatagcttcttccataggtggtactgtataatcatatgcactgtataggtcatagccctcggcctgtgtggactcccagctcccaggttgagtccagaaccaggcaaggtggagctacatgccccaccccaccctcctgtgcaagccagacccacttgcsgggggaaatgacaggtgtctctttggagcagggcatggcagagcaaggaggtgaggggaggagatagccacgagaaccagaaagtgcagaatgagcctcctccccatcaccaccacccccgccactgctggcagggaacacaccaagatcttaaaaatcatcagtttttagggccgggcacggtggctcacacctgtaatcccagcactttgggaggccaaggcgggtggatcacgaggtcaggagatcgagaccatcctggctaacacggtgaaaccccatctctactaaaaatrcaaaaatattagccrggcatggtggcaggtgcctgtagtcccagctactcgggaggtggaggcagtagaatggcacgaacccgggaggcggagcttgcagtcagctgagatcgtgccactgcactccagcctgggcgacacagccagactccgtctcaaaaaaaaaaaaaaaaacatcagtttttaataatgtttttaattcaactggtcacctaaggttgctgagttattatttattactctgaaaattgataagagggaaagaatcaaacatttcttcttcctgtcctatacaggccatgattgagggtaattcagcagttgatgaagtagtgtagttctttgtataggaaaatcacagctaataaatgcaaaagaaatgattgaatcagaaagtcaccattttgcagcctcttatgaaatagtggatctagacctgtcgttttttaaccagggatgatgccatccccctccccgaagggacagatatctagagacagttatggttgtcacaactggtgggggcagctacttagcatttggtagatgaaggctgttaaacatcttacacgtacaggacagctctccacaacaaataattatctggcccaaaatgtcagtagtgctaatttgggaaacctttatctaaacaataattatcaatggccactcaagcagtaagataaaaaagaagtttgatggggatatttatgatgggtggaacaagctgttaacacctgaccgaaactcaacccactgattgaccttaaatgggaaactgatattaggtgcctcctgtggggatataataggaattacgtggtatcttcctgtgaaatatgccatcccaaatggtttagccagcatccatgaagcttctagatctaggccgggtgcagtggctcacgtctgtaatcccagcactttgggagtcctaggcaggcagggcagatcacaaggtcagaagatggagaccatcctggctaacacggtgaaatctcgtctctactaaaaaaaaaaatacaaaaaaattagccaggcatggtagcgggcgcctgtagtcccagctactcaggaggctgaggcaggagaatggcgtaaacccaggaggtggagcttgcagtgagctgagaccacgccactgcactccagcctgggagacagagcgagactctgtctcaaaaaaaaagaaaaaaaaagcttctagatctagctaccagtttccaggaaatgtgaaagatagagggggacaacttaaatgaccctatcaggaagcagtcagcccagtccagaacgtgggaaggaaattctacaagccaaacgacccagtttcttcaacaaataaatgtcatggagggaaaaaaaatgtaagaggcacagtgggaactgtcaaggaattcagtgacaaataatcaagtgtagtgtgtgggtcctggattaactaaatcaaatgtaaacaggtattttgagacaatcaggaaaaattgggtattagatattattaaagaattagtcatttacttaggatgatgatattgttgggtttgttgtaagtccttgtctcttagaaatccatacatgaagtacttacatgaaatatttatgaattgaactgtgtgtccgaggttttatttttctttttaaaagtgatcaggtgaagacattaaaaaagtcatactgataattgttgaagctgagtgatggaaatttggagatcattttactattctgtctttataataaaaagtttaaaatgtaatgaaaattctgttatgctttatgtatattctattttggtgtcctttgataatgtatatacagtggaaattttattatttttagatactgtgtgtcctacctggtgctaccagcactttttttctttttcttttcttttttatttttttgagacaaggtcttgctctgtcacccaggctggaatgcagtggtgcaatcttggctcactacgtacaacctcagcttcccaagtagtaggactacaggcacaggtcatgtcaccatgctggctaatttttttttttttttttaatagagatggggtttccctatgttgcccaggctggtctcaaactcctggcctcgagtactcttcccacctcagcccccaagttctggggttacaggcgtgagccaccatgccttgccttttttttctttttgatgttatatattgtttgagaactcttaagttcctttgtgaaattatgctttataaaatgtcttctaggattcatttgtggggggtctaacaaccgtctgttttccattgatttcaatttctgtgggccatttgggatgttattttatagatttttttaatccattggaaatagtgaggtgccctgagaaaatttattcacatgtaatgcgttaaatcttacaaaagaagaaatattactgaatgatatagactgtgttcatagtattaatctcttctctcttatttttaaaatttagttctattgtttccaccctgctagctcttatggatggattggacagcagaggggaaattgtggtcattggtgctacgaacaggctagattctatagatcctgctttacgaaggcctggtcgctttgatagagaattcctctttagcctgcctgataaagaggtaagaatttaatgtcactcaaattttgacaaaatatattgctgtttattaataataagtcttggtatagtaaaaatktggagattcttgagttttgtatcatggtcttgtcaaatgatagtaaacaactcaaatggggacaaatttttattcttttctttaaatataataatgccttcccaaaattactcttaaaattatttcaatttgagtgtagcctttggatgttctaagtgttgcttcagaacatatggcttaatgagtaatcaatccttagccagtttgttagccttgtctttttcatgaatatcatcatataatcctaccgagtttttttaagtctacttaatcttctgggaaccaaagaggaaaatatgtcaagagctgtctgtactcttaaaaacagctcttaatatgcaccagaatgaatagctactttagtagttacttttctcttatttgtgtttatgacgaatataactttagtgctataaatgcaaatatgtttaataatgagacttaagttcattaaactcttaaaagtacatcctttttcttattttcactttcatattttgcttatattgagtttttttggttggttgtttatgataaagtcttgctctgtcacccaggctggggtgcagtggcacaatctcagctcactgcaacttccgtccccgggattcaagcaattctcgtgcctcagactcccaagtagctgggattacaggcacatgctaccacgcccagctaatctttgtatttttagtagagagtggttttcaccatgttggccaggctggtcttgaacttccaacctcaagtgatccacctgcctcggcctcccaaagtgctgggattacaggtgtgagccaccgcacccggccagtattaagtactgatcactttaaaattttagataatcaaaagtattttaatcaaaattaatgtaatctgaatagcatttattattatagttgtaaaaaattaaattgtttttattcataggctcgaaaagagattctaaagattcacaccagggattggaatcccaaaccactggacacatttttagaagagctagcagaaaactgtgttggtaaacattgttttaagcagttaaaataaatactacatttatttcaaatatgaaacaagttatattaggttggtgcaaaagtaattgtggtttttgcctgtaaaagtaatggcaaaaaccacagtttcttttgcaccagactaataaagaaatacaaggttatatttgtttcttatctcttatttgtggcattttcttctcatgaagtcttggtattaaatagagatatttgacaaattggccatcaggggcagagtagataataatataattgtacaaaatacaatatattattatatcataataagataatagctattctttactgaccattttgtagtcatccttttaagcattttacatatattatttcatgtaattttcacatcattcctgtgatgtaggtagcagtatctctacagatgaagaaatggctggagagcattatgtgaatcttctaaggtcatacagctagtaaattacaaactggaatgtgaatctagtctgtgtgattttaaaactcttgcttttgacctctgtgctatacttagtgcttgtgtattgcactcttaaaagttgattgattgttgatggccattactaccctataagtttactgggtaaaagagattttggtcttattactcttaaatatttgctaactatattccgasgctgatttttaattttttttttaaccatggtcatgctaatagagttttgtgtttctttgtttggtcggctggttcttttcttcccctggttgctttggataggatactgtggagcagatattaaatcaatatgtgctgaagctgctttatgtgctttacgacgacgctacccacagatctataccactagtgagaaactgcagttggatctctcttcaattaatatctcagctaaggatttcgaggtagctatgcaaaagatgataccagcctcccaaagagctgtgacatcacctgggcaggcactgtccaccgttgtgaaaccactcctgcaaaacactgtkgacaagattttagaagccctgcagagagtatttccacatgcagaattcagaacaaataaaacattagactcaggtataaaacttgattgaccatttaaagttagtttttataatcagtaaagtgaaatgtttcatacataccagaaatatttatttgtaaaagaatctcttgaaaagaatttggtaatgctttacctgggatatttgaaggaaatttactccatggattgcccttaatttaacttattgtaagtttggggtgcatttttacatttacttattaattcatatctacacaaatatttttgattctttgaaaaaatttaattgaagtatgctgacttggtaactgaagcaataaagatttgctttgcaatccaaaagttactaatgtacaattttttggttttatagatatttcttgtcctctgctagaaagtgacttggcttacagtgatgatgatgttccatcagtttatgaaaatggactttctcagaaatcttctcataaggcaaaagacaattttaattttcttcatttgaataggtatatttttcttgcaaatcaatgttttttgcatgtgtaaattttctaaaaataaatgagatgtggttgaaaaaataaaaagtgctaaccaatctgctttttatttaaattaaactaccagaaattttttgttgttacagttgtcacaacagtagaaattacagtctataaaaatattcctaaaaacctttgggggtcagtttccagaaactatgtgaaccatgttatgattggttggccttattggcaagactttttacttatgaaagtttatagttgacaatttagggggaaaatttaaactgttttttctaaaacatagcttattaatcatttctctttcagaaatgcttgttaccaacctatgtcttttcgaccaagaatattgatagtaggagaaccaggatttgggcaaggttctcacttggcaccagctgtcattcatgctttggaaaagtttactgtatatacattagacattcctgttctttttggagttagtactacatcccctgaagaaacatgtgcccaggtaatttgttggtgcccaagtataagacaaaacaggctttcagaggcaaaagctaaaattgccccatttttttgtattgtgtttttttgtctttctgatttgtaactttaggtttacaaaacagagttatgcatgattgcttagtcattaaagagaatgactttaaatcccacattcacccttaatatctttgtgaccttagtaaagttgttagatctctctaattttccccttttggaaaatggagataatactacttacctcacatggctgttgtgagaattaaatgagtaaagtacttaaaatggtgactgctccttagtaagtactcagatattctgcagtttctgtttttggtatttgtatattaacttttttttgtttgtttttggttttggtttttttgagacggagtcttactgtgtcaccaggctggagtgcagtggcacgatcctggctccctgcaacctccgccttccgggttcaagcaattctcctgccttagcctcccgagtagctgggactacaggtgcaatgcatgccgccacacccagctaatttttttttttttttttttttgtattttaatagagacggggtttcaccatgttgcccaggatggtctcaaactcctgggctcaggcagtccacccgcctyggcctcccaaagtgcgtggattataggcatgagccaccgcgcctggctatattaacatttttaaaacataaaaatattttatatttgtagttttgtttacttttgattaccacaatagaaaaatcttctagatttctccagctgttttctagttgcttgaagaaattatctttttccaaaaaaatgaaacttttaatccacatttaaaaataaggttgtgggattttggagaagcattttaaaaacttgaggactttatatgttactcctgggaggttaaacattgtttcagactaatagaactagcattattaacgtgctgactctaactgaatttgttttgttctctctctactaggtgattcgtgaagctaagagaacagcaccaagtatagtgtatgttcctcatatccacgtgtggtgggaaatagttggaccgacacttaaagccacatttaccacattattacagaatattccttcatttgctccagttttactacttgcaacttctgacaaaccccattccgctttgccagaagaggtaatttatgtggggcggtatcattatactttcaaaaagagttgtttctaccacaataatcataacttattgaaaaaattcaaatgctgtagaagtgaataaaaggataagttttcttatcaaatataccattggtaactatttggtatatgtgctcattgggcaagatggtatatgtatatgtgtatgtatatattaaggatacataaattttttctcttgaaaaatggtattatatgccgggtgcagtggctcacgcctgtaatcccagcactttgggaggccgaggtgggtggatcatgaggtcaggagattgagaccatcctggctaacagggtgaaaccctgtccctactaaaaatacaaaaaaaattagctggacgtggtggctggcgcctgcagtcccagctactcgggagactgaagcaggagaatggcatgaaccctggaggcagagcttgcagtgagccgagtgagccactgcactccagcctgggcgacagagcgagactctgtctcaaaaaaaaaaaaaaaaaaaaagtatttaaaaaatgggagtatatgatacatactattctgcaatttgctttattcatttatcaataaatgtattcatgtatttgttagtgctaaagtctctttaagagctgcatggtttttccactgttgatgtactataatttatttatccaaagccctattgataggttttttggttgttttccagatttttttctactggactcttacagtgagcatccttgtattttagttagtatgagcactggtatgtggatttttctagttttgattcctagaagtggaatagctgtagctgaatcaaagagtattttacatttacaagttttaacaatattaaattactcattcaagtttgtgccaatttagacaactgccaatagtgaacaaaaggccatactgcttctgcctggaatactcttctcttacatacttgcctgtcatcattttttatttttctcaaatctctgctcagatatcacctcagggaggccttctttgatcagagtttctcaataatagcaatagctctttcacccatcacactcttttcccttttcctgctttatttgtattgcctcctgccattaaatattaatttgcttgactctgtttccccatcagaatgtaaagtacatgaaattagggactattttttgtcacctttgtgtccatagagcacataacaagcatattgtaggcttctgtgtattttaatgaatgagtttaatggttttttttcacacttttgacaattggtttacactttttagaacactagtaggaagataagctcaaatacttactaaagaaatatttattgagtgcttattttctcccaggtgtggttctaggcactggagatataacagtgaataagatacacaaaaacgtgtatccttacacatgtagggctaacattttagttgagtgggggagagaagttttaaaaattttgtaatactaactattattgtggagaaagatttagctaaggggtaccaaaagagtatgggtaggttacagtgttaaataggctaggtaaggcctcagtaagaagatgatatttggccggatgcggtggttcacgcctgtaattctagcactttgggaggccggggtgggcgaatcacctgagatcaggagttcaagaccagcctggccaacatggtgaaaccttgtctctacaaaaattagccggacatggtgatgtgtgcccgtaatcccagttactcgggaggctgaggtgggagaatcgcttgaacccggaaggtggggtttgtagtgagccaagatcccaccattgcactccagctggggcgacaaagcaaaactccatctcaaaaaaaaaaaaaatgatgatgatgatgatatttgaggaaagacgtggaaaacgtaaggtagtgaaccattggaatagctgagggacaaaaggtcctagcagaggaagaagcaaatgcagaggctctgaggcagatctgtgtctggcaggttggaaaaatagcaagaaggccaggatgatagagcagagtaagtgagggataatggaggaaaggaggccaaggttatcaagggaccagattatgtccccagtgactctgtataataattgattasagaacctccaagttaaataagctaggaaatgaatattaagtatatattagaaactctttgagtgggggaggtccttaaaggtttccagtttagttaattatctagtttcataccctacactgtcgcctttatgtggatatctcatatgttgaaacagtttctacacagttctttttgttacctttgactcctaaaaatccaacttattgaaggaggctttcatttctctttctttttttttttaacttacaaaggggtcatgctaatcttctgtattgttccaattttagtatatgtgctgctgaagtgagcacaaatcttccacttcttaatctccattcatttcccagattgcatatagaacttgactaatacatcttcatcatgacaagtctttgtatatttgaatactcttttatgtcttgctgatccaggccttttcacattaaacaggatatggtatattcattagggctattaataaagtagaagtttatttcttactcactttaacaatactaggcaggttgattacattggcaagtttgtcttctgctatgcagtcattcaaacactcaggctgaaagatactttattttactttattttattttatttacttgtttatttatttatttttggagacggagtcgcactgtgttgcctaggctagcagcgtaggggtgcgatcttggctcactgcagcctcagcctcctgggtttaagcaattatcctgcctcagcctcccgagtagctgggattacaggcatccgccaccatgcccagctaattttgtatttgtagtagagatggggtttcaccatgttggccaggctggtcttgaactcctgacctcaggtgagccactgtgctcggcctgttttcttattttcatcatgtagccttccaggtcgctttcagtacagtcaactgaaaggacaggctcttgcttgtgcctgacttggaagtggtgtaaatcatttcctctcaaattccactggctaaagctcagtcacatagcctacttcattgcaagaaaggctaggaaatctgacctagctgtgtgcccaaagaacaagaatacagattgtggtaatagtagactttgttacacagcacaccaggttgtagtttcttcaaaattcttgtcactctcctgaatgtctttcttttttctagttcttttggaaggccagagccagaatgaatgaagtactctagcagtgttctgattaacacagtggaaaaaaaagattgttagccatagtattactggcttcttattctatcaactgaaactgttaatcattttgagatttgaaataaagataatggctttatgctccgggtaacaagtaagacaaactaggtgaactttgtatggatgtggagaggtcgaaaaaatgtaatcggtttaatctggggaaactttttcgagaatgtggaaattctataccaaaagatcttttcttaaagcatagcttctcttactttttttcttaggataatattttctaagcatataattgcaaactgggtaaaatattttaataccacattctataagtaggggagaatgggccagggactaggaattacccatttttataaaatgaataaaatgagcatggtggtgtgcacctatagtcccagctactcgggaggctgaagtgggagaaccgcttgaatctgggaggtgggggctgcagtgagtcgagattgcaccactgcactccagcctaggtgacagagtgagaccctgtctcaaaaaaaaaaaaagacaaaacttaccatttcatccatttttttaagcatatagtatagtcgcattaagtgcatttacaatgttgggcaaccatcaccactatccagatctttcttgttatcccaagcagaaactctgtacctattaacggtaattccccatttctatcttcccacagccctcggtaacttctgttataatttggctctgaattatttattctaggtacctcatataatttgaatatgwatttgtcttttgtgtcttatttagtgtaatgttttcaagttcatccatgttgtatcttgtgtccaaattttattcctttttagggtgaatacttttccattgtatgtatataccgcattttgtatccattcatctggtgacagacgtttgggtcatcttcacctcctgacgtttgtgaataaagctgctatgattactggagtacaaatactcatttgagtttttgttttcagttctttgggatctatacctagaagtggaattgccacatcatatactaattctgtgtttaaactttgagaaaccaccaaattgttttccaccgcagctacactattttacattcttaccagcagtccactgagtttccaatatcttgtagcccacacttaccttctggcctttatattttggtttttgtttgtttgtttgctttttatttttgaacagttgctctttcttatatctcatttggggttgggaaaatgaattaattgatctcaacaaaccttttaagtatcaggaccaggcacggtggcatatgcgtgtaattgtagcactttgggaggccagggcaggaggatcacttaagcccaggaatttgagatcagcctgggcaacacaaggagaccctatctctacaaaaagtttaaaaattagctgagtgtggtggtgcgtgcctgtagtcccagctactcaggaggctgagataagaggattgcttgagcccagtctgaggttgcagtgagctatgattgtgccactgcaatccagcctgagtgacagagcgagaccttgtctcttaaaaaaaaaaagaaaacaaaaaaagtaaaatatcatcaagtcagttcctttattaattgtagtttgggttcttgagttctcatgatttttagttccttaatctcttgtaaacatggtttatacataaatctaacattctttaaagacttgtttaaaaaatatacaatttagcttgtcattaaaaatatgtgtataataacctgctattgtcttgaatgactgacacatgcatttcatatgcatgtgtgtatatatactgcatacatatgtttatatactgtatagatgctccttgacatatgatgggtttatttggacataacccgattgttaagtggagggacatactgaatacatgtcactttcatgctgctgtaaagtctaaaaattgtaaattgaaccattgtaagttggggatcatctgtatatatgatatatattgcatttattttcttttttaaggtgcaagaattgtttatccgtgattatggagagatttttaatgtccagttaccggataaagaagaacggacaaaattttttgaagatttaattctaaaacaagctgctaagcctcctatatcaaaaaagaaagcaggttagtttctatatcaaagttaatatttaataattttgagaaagtaggaatgaaatagttaatggcattgacatgtatctgataacacaagctcaaaacctaagtcatgaggttgatgcatctgctscttaaaaatctctatgcttcccattaaaacagactaaagttcttaaggtacacaaagtctttcatagtatagccccaatctatctttctaagctcattttgggcacttgtgttctgcctcagccctccacccccacattttttttctcataaaacactatctttaaaccatatgtaacataattttaccttttcactattttagtaatgcttgctctctcatcagtaaagcttctatctctatcccccatctctgtctaaagaactacttattcttttatttttattttttgagacagggtctgtgtcatccactggagtgaagtggcatgatcgaggctcaactgcagcctcaacctcctgggctcaagcatcctcccacctcagcctccgaagtagctaggacaagaggctcatgccaaaatgcccggctaaatacttgtccttttagtatacctcatttattctttattatgaagcctttcctaacttatatgggcaaaatgaattgcttctgcctttatgacccatcatacttttaaaatactactaatatggcatcacaatgatataattatgcctcttactcccttagtagtttgtcagctcattgtggcaggactctaataatccyttttttcatcctgagtactcattggatatctatttaaacaaaataacctgttggtatatttgaaacatattacacattttcattagttcaaaactagtaaagaaggcttttttatagttagaatatttttgtcctggaaataatgcaatttcaaagtttaatagcctcttaaattgtcttttttttttttttccttgagacggagtctctctctgtcacccaggctggagtgcagtggcacgatcttggctcactgcaagctctgcctcccagattcacgccattctcctgcctcagcctcctgagtaggtaggactacaggcgcacgccaccacgccagctaattttttgtatttttagtagagaccgggtttcactgtattagccagggtggtctcgatctcctgacctggtgatccacccacctcggcctcccaaagtgctgggattacaggtgtgagccaccacacccggctgcctcttaaattatcttaawggaacagaggtaatgacttgtaggaattagcattccaaattacaagttactaatgatttctggaggggacgtagggttagagattatggtaatacttttgtatttcaaatctttggattccttgcatatatgaggaagataatccctcaaatcctgactctgttttcattaaatcatttgtcaacctcaatgttatggaggagcagtaactaaattcttccattcatgtgaagttttgcaggctttggaggtactcccagtagcaccaccacctgagccaagatcactgacagcagaagaagtgaaacgactagaagaacaagaagaagatacatttagagaactgaggattttcttaagaaatgttacacataggcttgctattgacaagcgattccgagtgtttactaagcctgttgaccctgatgaggtattagtttaatctttggatcaagtgtattctaggccataatgcttcacaatcaaaggatatttgaagagtttatgtggttctgcctacactcttaactagytttatctatttggaaacatgtaccgggttagtgtcctaagcacatgtagactttaagagcagggtaacgcattttcctttcctgcagacaattaactttgtctccccaacctaaacattccagaagtaattgagaatgtcttattattttttttttttgaaacggagttttgctcctgttgcccgggctggaatgcaatggcgcgatctcggctcattgcaacctccacctcccaggttcaagtgattctcctgcctcagcctcccaagtagctgggactacaggcgtgtgccaccacgtccagctaatttttgtatttttagtagagacagggtttctccatgttggccaggctggtctcaaactcctgacctcaggtaatccacccacctcagcctcccaaagtgctgggattacaggcatgagccaccatgctcggcccccccttttttttttttttttttttttgtagtaagggttgaggcctcactctgttgcccaggctggagtgcagtgacacaaattatctttcactgcaaccttgtggagatagggtcttgctgtgttgcccagcctagtctcaaactcttggcctcaagcaatcttcctgtctcagcctcccaaagtgctggggattacaggcatgatattattatgacctacacaattggaagagacctggagagccacgtcttaagttgctctgaaggatgggtggcaattggatgaggaaagaatataggctgttactggagaatacagctgcccaagaataagaaacaattactggaggatacagctgcccaaggaatagaaacaaatacaaaacaaaaacagccttaaatcaagtgaaaggttttatgttaaatatattatcataatctcttacgtatttattctctatctcctatattgcctggcatcgaaacttgactcacatgttatgtttagagttaattttgtgatttgatcatttgcttgaattttaggttcctgattatgtcactgtaataaagcaaccaatggacctttcatctgtaatcagtaaaattgatctacacaagtatctgactgygaaagactatttgagagatattgatctaatctgtagtaatgccttagaatacaatccagatagagatcctggaggtgagcattagtgaattttttttcagggggttgagttggggggcagctaacacttasggttgatttttgtgtcaggtgctatattataaacataatcaaaatactatttaatcctcacaacaaccattttacaaatggtaaaaatgaagtttagaaaggttaaaaacattgctgaaggtcacacttccaggaagggacagagtgagaatttgaatgcaggtttctttcattcccaaatccctgtttattaacaattacatgatagatcctctaatgagacacaaaatggcttgtatactttgtatatcagtgctcttcctcaaagtggaaaagtaggcactctgtaatgaaatagtttttaaaatattctattagttaagaccattataatttttattacaaaagcaatataatatagggcttactagtagtaatatttttaaaaatctagtcccccatttcctttctccaaaggcagacactgttaagtttgaggatatcttttcagacctttttctgtgcatataccccttctgctttcacctatcgcatctattaatataaaatttagtgggtacaatgtatgttatttgggtggtggatacccccaaagccctgacttcatgtgcagtctgtgcctgtaacaaaaattacacttgcaccccatacatttttacaaatttttaaaaataaaatgtataaaggatttttaatgatatgtttgttctgcagcttgtccatttccaagaaatgttctttcttgggtgcttatttaattttttgatggcttcctgttattacagatgcagagttctttaactcttaccagtggataaaaagatacattttaaaaatagttgttttctgtattcatttctcctccagtacattggctttctgtttttaaattggtggtgcttgttagttagattgattagtataggaaactactaaaatttttttcaacaattgaaaagcttactattctttccctcccagtcctctagctcaccttccctaggcatttccctgtagttcagagttctggagtcaagcagtaggaaacagactaacaagatgagaacagtccattgtacataggaagaagaaacgaggtaccctggaggcagagggctttctctgttgcattgcaatcatgctgttgctgctgctccctttctgtctattgtggcaatctaaaattacttcaggctagtggtgtcaaatgttagtggacatcagaatctcctaaaggacttcataaaatatggatcactggaccccatctctagggtttctgattctgtaggtgtggcccctgagaatttgcatttctaatgagtttcccggtgacacaggctgctgagttctggaaccactacttagaccttgccctgactttcttcaggcccaaatgccatgttagaaagcccacttcagcattctgcgtgtaatgtactgtataacctgggagtgaattttgcaatctcttgtcctttgaggagtattgatgtggctcaagcaatcctgcattcacttattccgtcttctgcctcaaatcatattccagtttgtagtattcatactctgagcttaggattttcccagtgtttcctgtggagggttgctttttcattgtctttgtctattttctttgtcaatgcaataacaacctctataaatctcttgcaaaattctttcacattctttgttcactaatgacactgawagccttctcttttatttttcgttatcatgtttaatctcttgctattgattgattccttttttttttctgatatttcaaagggatctgaacaggacagagcagtaaaattgtttgggtttagtttgccatattgaatcagatgtccagaacattagattagctccagaaacagaataggacaattccagtaactttgactattcttggtaaaagtcaaaaggaattgtaagagctactatcttagcctaatatgctgagtttatttttggtatattattaaaagggggaaattaaaaattacattttttactcacttcatagatcgtcttattaggcatagagcctgtgctttaagagatactgcctatgccataattaaagaagaacttgatgaagactttgagcagctctgtgaagaaattcaggaatctagaaagaaaagaggtaggaaagtgatttggttgatttgtaccaacctaatattatcaatgaatttcagaatatatgaatttcagaagcatctgaaaaggatgcttcagatgtattttgtacttttagttaatccttcatgtaattttgaaatctggaaatccttttgacatcccamatatctatttataaggttgtagctcctccaaatatgccccgtcttactaccatgtgatgccaaagcaaaattccactcttgtkggtgataaaagatcagacccagagcagaatgaaaagctaaagacaccgagtactcctgtggcttgcagcactcctggtaagtactcaagtagttttcatttatgaaattataactttattcttttctaatgycattaactttctcccttattttcctttatttgtgttaatgcagtgaattacattgattttgttactattaagacaactttgcattcttgaaataaatccaagtttataatgtaccacttgcaacccagaagtcaccatctaattgtggactgtcttgatttgaaactgatgtctgtaaattctggtctatttcttactcccccttattcttagaaggtaactccacgttacctattcaaagcctgtagggttttctaaggcctgccttccttggcagacttctaattccaatttttgttctttaagcccctttgtcagactgcttagcttctcagcctctgttattcacttgttttcccagattttagcactgtaattcctcactacccttttttttttttttttttttgagacggagtctcgctctgtcacccaggctggagtgcagtggtgcgatctcggctcactgcaaccgctgcgtcccgggttcatgccattctcctgcctcagcctcccaagtagctgggactataggcacccgccactatgcctggctaatttttttttttttttttttttttttttttgtatttttagagagacggggtttcaccgtgttagccaggatggtctcgatctcctgacctcatgatccacccacctcggcctcccaaagtgttgggattacaggcgtgagccactgcgcctggccattcctcactacctttttagatctctgtgtgtgtgttaaggttagggttagcggtgtttgctggggttgaaccttctattgtattgcaagtttgtccatcctcgggtaattgatttgagatagataaagaataagcccttcttttgaaaaaatgggaggaggcagctgggaaaggaaagataagagaagaaaattagcaagaggccttcactaccagaatgctgacagtcaaatcagctttaagcaagtatatatatatggaaattggctcccttaaaacaatcgtttgatagatacccaacaggattacatattttgtgtccaccaaaagacatgtacaagaatattcaaagaagcaatattcataatattaggttggtacaaaagtggttgtggytttgccattaaaagtcatggttcaacactgggggtaactcaaatgcccattaccagtagaatggaaagatatgaattattatacagtgagaatccttaaacgtcaactacatacagcagcacagatgaacctcccaaacaatgttgagtgaatcctagatacatttacatgtgaaataaattttaaaatatgtatttaaaatttttatatatgtatgaagtcaaaaatgggcaaaactaatccatggtgtcataaatcaggatattatttactttttaggatattatgactagaattagaataagggtgatttggaatgttagtatatattctgtttctcaatctgggtgctgattatgtgagtttcttctgttggtggatattcatttcatttttatgttctgagtacaattgacccttgaataatacgagtttgaggtacacaggtccacatatgtgtggatttttttcaataaatatcttggaaatttttttggagctttgcaacagtttgaaaaaacttgcagattgaatcacgtagcctagaaatagtgaaaaagttaggtatgtcacagatgcatacaatatgtatagacagtagtctattttatcaccaccataaaatatacacaagtctattttaaaaagttaagatttatcaaaacttaccacacaaacacagatcgtacatagcaccatttgcagtcaagagaaatttaaacaaatgtaaagactcagtattaaatcacaactgcataaaatttactatagtacataactttactaccgtaattttggagccacctcctgtggctgttgtggtgagctcaagtttcatgagtatctgcttaaaacgatgtgtgatgcggtgagcagttggcctgtccagtaaattgcttattgcagtaaaaagtgatttgcggttctcaagtattttttgtgtgtgtttagtatagtacaaaaaatcttgagtaacaccataggacacataggaggtgccactagtaatgctggaagtgctcccaagaagcagagaaagtcataaccttctaagataaagttgaattgtttgttatgtaacatagattgaggtctgcagctgtagtaccctgccctttcaagacaaatgaatccagtataaggaccattgtaaacaataataataaagagccaggcatggtggctcacgcctgtaaacccagcactttgggaggctgaggcgggtggatcacttgagatcaagagtttgagacaagcctggtcaacacagtgaaaccccgtctctactaaaaataaaaaaaattagccaggcatggtagacagtgcctgtaatcccagccactggggaggctgaggcatgagaatcacttgaacccaggaggtggggtttgcagtgagccagattgcatcactgcactccagcctggccaacaaagtgagacccttgtctcaaaagagagaaaagaataccaggcgcagtggctcacgcctgtaatcccaacactttgggaggtcaaggtgggtggattgcctgaggtcaggagctcaagaccagcgtggccaacatggtgaaaccccgtctctactaaaaatacaacaactagctgggcatggtggtgcacgcctgtaatcccagctcctcctgtaatcccagccctcaagggactgaggcaagagaattgcttgaacccagtggggcagaggttgcagtgagccaagatcgtgccactgccttccagcctgggcagtagagtgagactgtctcaaaaaataaagaaagaaaagaaggaaattttgaagctgttgttgcagctgcactagcaaatgcaaaaactttgtactttttgtgaaataccttttgtctgatattgaaaatgcagcttttatccggatgcaagattgctataagaaaggcatacctgtagactctaatacaattcaagaaaaaatgaagtcattatatgacaaagcagaaggaatttaatgccagcaaaagatggtttgataattttagaaagaggtttggcttaaaaaatatgaagatagggccaggcgcggtggctcacgcctgtaatcccagcattttgggaggccagggtgggcggatcacgaggtcatgtgatcgagaccatcctggctaacacggtgaaaccccatcactactaaaaatacaaaaaattagccgggcacggtggcggcacctgtagtccagctactcgggaggctgaggcaggagaatggcgtgagaccaggaggcggagcttgcagtgagccgagcctgggtgacagcactccagcctgggtgacagagcaagactccatctcaaaaaaaaatcaagataacaagagaagcagcttctgacaaccaagaggcagcagacaagttcccaaacaccattaagaaaatcactggacagaggccaggcactatggctcatgtctgtaatcccagcactttgggaggctaaggtggtaggattgcttgaggccaggagtttaagaccagcctgggcagcagagcaagaccccatctctaaaaaacaaacaaaacactggccaggcatggtggcacacatttgtagccctaccttcttgggagactgaggtaggaggattgcttgagcccaggagttcaaggctgcagtgagctattgattatgccacagcactccagcctgggtgacagagcaagaccctgtctcaaaaaaaaaaaaaaaaaaaaaaaagaagccactggggagaaaggtaatctttcattctcctttgtcatttctattacctaaaagttttaccacttctttccaggactactgctgtgtggttatactgcatctagtctaggcagaatatttaacctctctgtaccttagtttcttcatctgtaaaatgatgatgataatggtagcaaacttcaataaaataaagtgaaaaatttttttttttttttttttttttttttgagacggagttgcgtcacgcaagctagagtgcagtggcatgatctcgattcactgcaagctccgcctcccaggttcacaccattctcctgcgagtagctgggactgcaggcaccggccaccatgcccggcaaatttttttgtattttttgtagcgatggggtttcaccgtgttatccatgatggtctcgatcacctgacctggtgatccgcccgcctcagcctcccaaagtgctgggactacaggcgtgagccaccgcgcccagccaggttaaattaaattttaatgagtaagcatacataaggggcttagaagaattcctagtatatgcttgatgcagtggcatacacctatagttgtagccactcaggaggctgagttaggaggatcgcttgagcccaggagtttggggttgtagtgcgccaagattgtgcttgtgtatagccattgcactccagtctaggcaatgtagtaagatagtttctagtacatgataaatgctcaataagtgtagcctatttcaagtcttgcccttcttccagtccatttctcatactgctgccaaagtgatctttgcaaaatatgcattagacagatcatgtcagtaccctccttaaaagtattcaagattaaaagtattcaagataggccgggtgcggtggctcacgcttgtaatcccagcactttgggaggccgaggcgggcggatcacgaggtcaggagatcgagaccatcctggctaacaggttgaaaccccgtctctactaaaaatgcaaaaaattagctgggcatggtggcgggtgcctgtagtcccagctgctcggagaggctgaggcaagagaatggcatgaacccgggaggcagagcttgcagtgagccgagatcgcaccactgcactccagcctgggcaacagagtgagactccgtctcaaaaaaaaaaaaaaaaaaaaatttcaagataaaatcaaaattttttaccattttatggtctgggccttacccacttctccaccttctcacagtatgctctattcttgtttctgtattttaatcatacaaaatactgtggtttctcactatttatcctttcatatatcagggtttttcactctttgaatttcagaaaatggttgaatgttctttcatcatttttctttaaatttcttgaagctcagttgaagaggaaaattcgcaaaaagtcaaactggtacttaggcaccataaaaaagcgaaggaagatttcacaggcaaaggatgatagccagaatgccatagatcacaaaattgagagtgatacagaggaaactcaagacacaagtgtagatcataatgagaccggaaacacaggagagtcttcggtggaagaaaatgaaaaacagcaaaatgcctctgaaagcaaactggaattgagaaataattcaaatacttgtaatatagagaatgagcttgaagactctaggaagactacagcatgtacagaattgagagacaagattgcttgtaatggagatgcttctagctctcagataayacatatttctgatgaaaatgaaggaaaaggtacgtctttttcaattaaaataatttactgattttaaaagatatttcaaagtttctaaacacctaattgcatcttagtttattgctttttgcttgcctttcagagagcagatgttagttaattagaaaacaatagcattatctttactattgagctagtaaggatagttacaagctgtggcatcaaacagacctagatttgagcctccagttcactacttagtagcttgtgacctttggcaagatacttaacttgtcagcctgtttgcttatctgcaaaattggggtagataagatagttgcttggtaatgaggcatttttaagattaaatgtaacaaactaaagtatatgataccctttcatttttaagcaagataagagtctgctatgattcttgctgagtggtatgaacaactcttaccccgatcatttttctatcccttattgtaggttaagtcyaagattatttatatttattctactgatctgctccccaaattttctatttagaattgttgtcatttggatcttctggagcccttgacagtagatttgtttggattttagaaaagccaaacattatttaatcatacaaagcaaaatagtggataatggggccaaaaatttattttggtcaaaaataagcattgactaagttaatggacttttttttttttagtggctgatacactgaatgcaagccttttgcaagggcttctttgacatgagctctaagtgtatttgagtaattagcaataatagactaggatatactttctagtgtgaatattttaaatgttaatcttctggctgtataatatgttttggtttgaatcagatttgttttatttttcttttatcattttctttttaaaaagaatactatttagcagtacaggtacttgcttcgatatcaggaagtctgagttcttatcctggctctcacaacaattagatgtatatccttagaaaagtctctcttcacggtcaggcgtggtggctcacacttgtaatcctaacactttgggaggctgtgggtggatcacgaggtcaggagttcgagaccagcctggcctatatggtgaaaccctgtctctactaaaaatacaaaaattagctgggcgtggtggctaacgcctgtagtcccaactgctctggaggctgaggcaggagaatcacctgaacccgggaggtggaggcagaggttgcagtgagctgagatcatgccactgcactccagcctgggtgacagaaagactccatctcaaaaaaaaagaaagaaaagtctcttcacctctcctggccttatttttctcatttatcattgaatgtattgttctaaatcatggatcagcagacttctttaaagaaccaaataccagatagttaaatactttagcctacacaggggcccatacaatcttggtctctgtgacaactactcaaccctgctgggaaaactacattgacagtagataaaatggatatggctgggttggtttgtttgttttgagacagagtcttgctctgtcatccaggctggatttcagtggcatgatctctgctcactgcaacttctgcctcctcggctcaaacgatcctcaaacctcagcctcccaagcagctgggactataggcatgtaccaccatgcgcagctaatttttttttcttttttttttttaaagagatggggttttcccatgttgcccaggctggtcttgaactcctggactcaagggattcacctgccttggcctcccaaagtgctgggattacaggcaggctgtgttctaataaaacataatttacagtggtgggccagattttgaccatgggtggtattttacaacccctgttctagattattgaggtcccttctagcttttcagttctgtgtgtcttgtgctcaagtagaagacattctaacctgttgagaatccccttgaaatactcaatatgaaacatacttctcaaactgtccttaatttttgagtgtatgagtggcagtatcttaatcttataacagaatgagttaataagccagaattgctgtttatgtccttagtaaacatgccctgtttaatctgcctaatattattatttattttagacatcataatatctatggaccaaataataatcatttgatttttcattctagaaatgtgtgttctgcgaatgactcgagctagacgttcccaggtagaacagcagcagctcatcactgttgaaaaggctttggcaattctttctcagcctacaccctcacttgttgtggatcatgagcgattaaaagtatgtaaattgaaatcataatgcttttactctgcagattactaatccccaaacactggcttgtgactagtagcattctggctacatgggatttacatgaaaaagtaaaactttttttcctccaagcttccctttactgttcttctccttcccctgttccaaattaagactaggtcaggcacagtggctcacgcctgtaatcccagcactttgggaggctgaggtgggcggatcacctgaggtcaggagttcgagaccagcctggccaacagtgtgaaaccctgtctttactaaaaataaaaaattaggctgggcgcagtgactcatgcctgtaatcctagcactttgggaggctgaggtgggcggatcacgaggtcaggagattgagaccatcctggctaacacggtgaaaccccatctctactaaaaatacaaaaacaaaattagctgggcgtggtggctggtgcctgtagtcccagctactcgggaggctgagacaggagaatggcgtgaacccaggaggtggagcttgcagtgagccgaggttgtgccactgcactccagcctgggcgatagagactctgtctcaaaaaaaaaataaataaataaataatagataaaacaaaaaattagttaggtgtggtggtgggcacctgtattcccagcctactggggaggctgagacaggagaatcacttgaacccagaggtggaggttgcagtaagccgagatcgtgccttccagcctggatgacaagagcaaaactctgtctccaaaaaaaaaaaaaaaaaaagaattattactattattttttaatataaaatagatttttaattcttaaaaaaaaaatagacaaagtctcwctgtgttgcccagtctggtctcgaactcctgagctcaagtaatcctcccacctcagcctcccaaaatgctaggattataggcatgagccaccatgcctggcccaaaattaagaattatatccaaggatctgtggtaggaatcagagagaaaatagctaagtgattctgacagctgtcaggttatctgttgctcattctgttcccctgcctgttcccctaaattcaattttcatcctaaccactgtaataaaatgacatcctaatagctaataatacttgcctttgttaaattgaattcttcttgccatatctgtaacacttgacactatagataactcttcttccttgactgttgtgtccttaaatcatccttgccttcaattacttttgtaagctcctcagggtttttctgatcatttgctctattattctgtacttttggaatagccatcacctctgtaacggtgaacctacatctggaaccccacaccctgacacacctaaacaacggtcttatctcctcaaccaacaacttggatgtgttacagttgccttaacatatttgaaataagattgatttcttgcccttttccttcaaaaataaaaacattttgcatcccaattccaatttacctgttttattttggccacatttcaagtctgaaaacattatatgtttatcagagatacattatttgtaatacagataagagttttggcattttagagggaaatctgccctgtttaagtacaaagtgaacctgttagtactaatgaacttaggaaagcctttctcttgaatgtagcagagctaataagaacttgatgtctacacttcttagagaaggaagcagcaatattcctggagtagtttctctcaaaaaactgtagtctttctgaaaaactctattaaaaaatatatgtggaactgaaaacccatgtaaatctcatgacagtgaaatgtattcctagtgctgaaacaggaacttgtgtgtaagttcaccgtgttatgttgtttggggttaagagtagcaattattattttacttaatttttataaattttacagctttgttctgctcagtatacatgtatgtcattcagagtcaattaaattcattactgagactatttcaatttactttttctgatcatataacccatcaaaatagactatgtaatagtaccatatatccattaggcatgcaataaataatggccttttatgagaggatatacttgctatagaataatttgtataaaggatgtagttggaggtgactatttaatgtattaaattgcagtttttaacttgctgatctaaattattggtcccatacattgtttttatgaccattacctatggccattttagttggtttttacttaactataatggtgtgtttttgttaattatgaggtaatggcagcatattctggtagggccagacttgaagaattacagaaatccagtaagtccaccattttagtcatgagaaaaaaaacacttagcagatggaaaatcctttttatataagaaccctgaagtggtgaggtagttcaccatttatgtagtatcttttttagtttcacataataaaattagttaaaatgtacttatactatcataaaatcccctgcaaaaaaactttgcttttctcctgttaatctaaattgaggttagtttttaatttgtttgtagatgcttatggctagacttagaattggcaatcccctcagctctagtttttagaatatgagttactcaaggtcaaggccaggattatagctagacttaagtacatttaaatgtcagagccactgccagaggctgccctgtgtcatcagatggcttggtctaccctctgtcaggcttgtaataattgcccaaaccttctaaattaagtatcttgtctgaggaagtttctctctcacacatattgacactcatattttcttttagaatcttttgaagactgttgttaaaaaaagtcaaaactacaacatatttcagttggaaaatttgtatgcagtaatcagccaatgtatttatcggcatcgcaaggaccatgataaaacatcacttattcaggtaaactcttgagtggaaactttttacaaatgctcttgtggtcacattaatatatcacttatgtaggattgttgaggctttatttaatctgtgtaagaaactgattgtaggaacttaaagaccatctttctatttccaaagttgatgtcccattccataaagatcatttttaatatgtggattatgaattatttctaaatgcaagtgagtttagtatttttccaatctataacttaattagtttgtttgtttatttatttatttatttagagacagggtctctgtcgcccaggctggagtgcagtggtgcgatctcaactcactcactgcagcctccacctccaaggttcaagcgatcctcctgcctcagcctcccaagtagctgggaccacaggcacctgccatcatgcccagctaatttttgtgttttttgtagagatgaggtttcactatgttgcccacgccgatcttgagctcctgagctcaagccatccagccacttcagcctcccaaagtactggaattacaaacgtgagccactgcacccagccaatagtttgtgtctttaataaatagtggaacataaactatgaataccccttttgtgtgtatgtattaatgaagaataatagcttcttttaagacttgtcagccaggcacagtggctcatgcctgtaatcccagcacttggggaagccaaggcgggtggattgcttgagcccaggagttcaagactagcctggccaacatggtgaaaccccatgtctactaaaacaacaaaaactagccagatgtggtggtgtgcacccatagtcctagctactcgggtggctgaggcatgagaatcacttgaacctgggaggcagaggttgcagtgagccaagatcaagctactgcactccagcctggctgacagagtaagactctgtatgacaaaaaaaaaaaaaaaagacttatgtacttaatcttcctttatagtaggtattatagtgttaattagagcattaatacttatttttgagacaggatctttctctgtgtgcagtggcaagaacatagctcactataacctggaactcctgagctcaggcaatcctgcctcagcttctcaagtaactgagattataggcaagcaccaccacactgggctaatttttaaattttttgtagagatggaggttttgctatgttgcctaggatggtcccaaattcgtagcttcaagcggtcctcccgcctcagcctcccaaagtgctggcattaacaggcaggagccaccatgcctggccttattattatttttaataacagatcatttcactagagagtgctaaattttaaaaaaagatattacttacatatgcatattattggtaactacaaaatataaaaatgataaccattagtatatatatagtatttagtatacctactaaagtatactatgtagtatatatataatattgatacctacaaagtgtaaaatactaaactctaactacatcagtaccttgattaatactatttgaatttaacataagatgaatgcaccccagactcatttcaaagttatttaaataatgaagtcctacaggtaaaatctatgtggcagtcttaaatactgaactgaakgtttattttcactatcaaatatatacctgaatattaatattcttaaggttgtttactgaaaaagtaatgaaatgtttctttagcttattccatattgaaacttactatttgctcttcctcccctttatctagaaaatggagcaagaggtagaaaacttcagttgttccagatgatgatgtcatggtatcgagtattctttatattcagttcctatttaagtcatttttgtcatgtccgcctaattgatgtagtatgaaaccctgcatctttaaggaaaagattaaaatagtaaaataaaagtatttaaactttcctgatatttatgtacatattaagataaatgtcatgtgtaagataactgataaatattggaactttgctagaacaagaccctgtagtaatagtaataatagttgaagtttggccaactcttaataaagttattttggtaactaatgttttatggcacttaagaataattagcagcgttaaattttgtttgtattaagcacttttaattttatccttcctaaaaatagtttattgtatctgacaagaaacttacttaaccattgtgtccttcccatcttttttgtcatctttgttttcttcaaatgccctcctmccatctgccttgagattccctygtcttcacttaaaagccagagtgcaagtcatgatttgcgggagggctcttgaaccacttctggctgcaccacaattctgtacttgagtatcacagtcattgtttttgagacaaacatttttataattctaatttgggttaataaagattttaaatatttcttggtttacttttgtaattatatacacaacaaatgtattaataactaccttgttaaacaccttttaatagcacaaggtttttatatttgcaagctgttgatatctttctaaaactgtttaggttatagtctattgatactttttatatacaattttataaatataaatattataattttatattaatggtaccaaaaatacatttcttaaggttaaaagcatgcacttccatgcatacttgcttttggggagagtggggagaagacattctaataatcagtttgtgaaatagcttctgttggaaaccttttgaggggaataaggaatggtcatctaaaatgagagattctggattttaatgcagttcaaagttgagctgtatttttgttgttgatttatctggattttttttaaagccttctaaaacccagtgaattcaataccttaattagtacatactatcttatgtaatgcataaagcaatgccagtcactgagaacatttaaatatatttatattcctggagatacacattctcatttttgttggtttattataaattattcttctagatgcatcttttataactaggatttcattttgtgtgtatagcttatgtaataaattttaaaggtgaaaactctcttaaatttgtttctatttcttaagtattttaaaacatagcaaagataattctgtgcaaaagaagtgtaaagtctgttctttcatatattactgtgaaaatttaaagtgctgttgacactggaatgtttttatatggtacatgtattttaggtacaacgactaaagtgcttcctgaaatgtcttctacagattttagaagtgttatgtctacattcctatgtagagtttgaaaaccatgctgaaattgcagtgttgaatgttatctcccatttgttgctcaaaagtgcagttaacgcaagaaaaacaaaaggaactcagaaaggaaaaagtgaaattctctttatttacaaatgccatgattttatatgtaggaaatccttttttgagacagagtcttgctctgtcgcctaggctggagtgcaatggcatgatctcggctcaccacaacctcttcctcccaggttcaagcgattctcccgcctcagcctcttgagtagttgggaccacaggcgcataccaccactcccagctaatttttgtattatgtaggaaatcctgaagaatccacaaaaaatctgttagaggtagtaaaagaactcagcaggctggatgtggtggtgcatgcctgtaatcccagaactttgggaggccaacgtgggtggatcacttgagctcaggagttcagggccagcctggacaacatggtaaaaccctgtctctacaaaaaaaatacaatcattagctgggcatggtggcacatacttgtagtcccagctattccctgggaggctgagggcaggaggtcaaagcttgagcccaggaggtcaaagctgcagtgagccaagattgcactactgtacttcagcctgggtggcagagtgagactctgtctttaaaaaaaaaaaaaaaatcagcagagttacaagatagaaaacatactaaaatcagttgcatttctatacactagcaatgaacagcccaaaaggaaaattatgaaagcaattttacttataataacatctaaaacagtaaacacctaggaataaatttaaccaaggatatataagaatttaacatactgataactacaaactgttgccaaaagaaattaagtaagacctaaataaacggaaagacagcctgtattcatggtttggaagacagtactggttaagatggcagtaatccccaaagcgactacagattcaatgcaatttccatcaaaatcccaatggcctttttttgaaaaataggaaagtaaatcctaaaaatcatgatgtattgcaaggtaccctgaatagcccaaaaaatcttgaaaaaggagagaactcacttcctgactttgaaacttactacaaagctacatatattaaagcagtataatacaggcataaggttagacatataggtcaatggaatagaaagtccagaaatcaatatatctatggtcacttgattttcaacaagagtgcccacatctattcaataggaaagaaccatttcttcaacagatggtgctggaacaactggatattcacatgcaaaagaatgaagttagatccctatctgagaatagctaatgtgtgctgggcttaatacctaggtaatgggttgatgtgtgcagcaaaccaccatggcactcgtttacctgtgtaacaaacctgcacatcttgcacatttaccccagaacttaaaagttgatttaaaaaaaaaacaacaacaaaatggattaaagacctaagttgaatagctaaaagtaaaattcttagaagaaaacaaggacattttcatgaccttgagtttggcagttagataaattggacttcatcaaaattttaaaactttgtgcttcaacaaataatgtatataactcctaaaactcaacaacaaaaagacaacccaatggatgtggatatttttgatgacattaacaatatttaggataccaggcaaatattttggaagatagctattttggaatagtctaatgtttttctcatgaccagaccaggactatgggtttggggaaggaaggcaaagtggtcatatcaaggttgcctactagtgatgtgattcttgactattggttgactttgatcaccaagttaagtagtatttctcaggtttctccaccgaaaaattaatcttttctgaactatacttctctcttttgaactgtactctgaaaagaagtcacacaatgaacagcccactcttaaggagtgaggagttacactctgccatttatttttaggccagttctatcagtgatccctaaatgtacacattgtagagttaattgagcttattttagactcgtgtcttctccctactactccccaccttatatacagagtattttattgttcaaagtaatgtaattaagagattgctccctgacattgaggaaaagattgccaacttgcctcctaatatccattcttccgttatttgtaacaaagtcccatttggaaagttatgtttcatccattgcagcaaaatatggccacgtgactaaattctagccaatgagatagggaattgcacacagtttctaggaaagctctctggaagggcaaggatgagagtactttctgccttctgagcttcctatacacacacacatatacacatatatacagttaagaagcatctgtatgtgtgtgtgcatgataattttagggaattgctgttcagtatccttgagtggatctctgttactgatagtggaatgtaattcttaaccagtaaaagcatataaaataaatatgtatttttttcaactttcatttactataagcagcagatcctgagcaaggcctttagagaccctcaagcataaaaaatattgtctccaattcttacatgtattttttaatttattgttaacatctttattgaggtataatttatatatcataaaattcactgatcttaacagtacaatttaatgattgttaatttacagagttgtgcaactatcagcatgaatcagttttagaacatttccatctccccaaaagagagatttccagtctcttcctcgtgcccatttgcagtcaggcctcctacccccaaccccaggcattccctaacctactttctgtctctatagatttgcattttctggacagttcctgtaaatgaaataatatatagtcttttacatctggattctttcacttaacataatgtttttgaaattcatcagtgttgtagcatgtatcagtaatttggttttttttttttttttaaatttatttatttattttttattgataattcttgggtgtttctcacagagggggatttggcagggtcataggacaatagtggagggaaggtcagcagataaacaagtgaacaaaggtctctggttttcctaggcagaggaccctgcggccttccgcagtgtttgtgtccctgggtacttgagattagggagtggtgatgactcttaacgagcacgctgccttcaagcatctgtttaacaaagcacatcttgcaccgcccttaatccattcaaccctgagtggacacagcacatgtttcagagagcacagggttggaggtaaggtcacagatcaacaggatcccaaggcagaagaatttttcttagtacagaacaaaatgaaaagtctcccatgtctacttcttcctacacagacacggcaaccatccgatttctcaatcttttccccacctttcctgcctttctattccacaaagccgccattgtcatcctggcccgttctcaatgagctgttgggtacacctcccagacggggtggtggccgggcagaggggctcctcacttcccagtaggggcggccgggcagaggcgcccctcacctcccggatgggggggctggccgggcggggggctgaccccccacctccctcccggacggggcggctggccgggcggggggctgacccccccacctccctcccggacggggcggctggccgggcagaggggctcctcacttcccagtaggggcggccgggcagaggcgcccctcacctcccggacggggcggctggccgggcagaggggctcctcgcttcccagtaggggcggccgggcagaggcgcccctcacctcccagacggggcggctggccgggcggagggctgacccccccaactccatcccggacggggcggctggccgggcagaggggctcctcacttcccagtaggggcggccgggcagaggcgcccctcacctcccagacggggcggctggccgggcggggggctgacccccccacccatctccctcccggacggggcggctggcctggcggggggctgacccccccacctccctcccagatggagcggctggccgggcgaggggctgacccccccacctccctccaagacagagcggctggccgggcggagggctgacccccctacctccctcccggatggggcggctggccgggcagggggctgacccccccacctccctcccggacagggtggctggtggggcggagggctgacccccccacctccctcccagatggggcggctggcctggcagggggctgaccccccccacctccctcccggacggggtggctgctgggcggagacgctcctcacttcccagacggggcggctgccgggcagagatgctcctcacctcccagacggggttgcggccgggcagaggtgctcctcacatcccagacggggcggcggggcagaggcgctccccacatctcagatgatgggcggccgggcagagacgctcctcacttcctagatgtgatggcggccgggcagaggtgctcctcacttcctaggtgggatggcggccgggcggagacgctcctcactttccagactgggcagccaggcagaggggctcctcacatcccagatgatgggcggccaggcagagatgctcctcacttcccagacggggtggcggccgggcagaggctgcaatctcggcactttgggaggccaaggcaggcggctgggaggtggaggttgtagcgagcccatgtatcagtaatttgttatgttgtattgtgggatagtatttcattgtacggatatgccccttttgcctattcatccacagttgatggacatttggattgcttcacattttggctaatatgaatagtactgctgtgaacatttacatgcaagtcattgtgtgacttatgttttcatttctcttggatagatacctgggattagaattgcagaattatatggtaaatttatgattatcttaaactgctctccaaagaggctgctacatttccactggcactgtgagggttccaccttgtccacattcttaccacccttgttatcatctgtcctgttttttgttgtttgcctttttgtgtgtgtgtgtgtgagacagagtcttgctctaacacccaggctggagtgcagtggtgcaatctcagctcactgcaacctccgcctcccgggttcaaacgtttctcctgcctcagcctcctgagtagctggaaccacaggcactcaccaccatgcccagctaacttttgtatttttactagagatagggtttcgccatgttggtcaggctggtctcgaactccttgccttaagtgatcctcctgcctcagcctcccaaagtgctagggttaccaggcctggccttgtctgcttttaatagccatgcaggtgggtacaaagtggtactctttgtggttgttaactgcattgctctaatgattaatgatgttgagaacatttttcatgtacttattagccattcatatatcatctttggtgaaatggccttttgaatattttgaccattttttaattgtttccttattattgagttatgagagtctttatgtattcacttattttcaagagagtcgccaaggcagttgggaaaaaatagttactttttaacaaatggtgctggattaattggatattcacatgcaaaaaaaagatgaaattagatccttacctcacaccacataa

SEQ ID NO: 94563 - DNA, 21089 bp, Homo sapiens
tggtcatttgttacagcagcaataggaaattcatttttaagtactaacatttggcgttatttgccagttatcatttggctaattcctaatccttacaacacatgttagattttttaaaaagttgaagttattgggtaaattttgaaggatcaacccagaaaataagaagcagaggtagggtttgaactcaagtgtctctgactccaactcatactcattccacaaaaccagtatgccttaaagagggataaaatcaaaatgcagatattgcacctgagtatttctctgaatgttctgattagaatcccagagcccatcgtttctggcagaaactagatgtataattcaatatctattgttcctctttaattcattgttttttttttctctccttaaacttttctctctccagttgatactgcttaaacataaaagtaacattttgaactgaatattaacttactgcttttaacaaatcaaactgttcacttcaaatcatattatcaactatagttatattagaatgtgagttgaatacagtaggtattcacctacaaatacagtatctgttttctaaggaaaatatgcttttataaggtatgattggttctcctgataaactatattcaaaccctgcagctctctaacaagagtggctattcagtggtgatacacttagctgtgcaaactttactgctggttatagacacaataagcatgggtgtaaattctccagttataaggatgcagttttccctcaaacccataatgaaaacgtaaaactttctttagttttcacaaagctagaattaattaaatcctaatcctgacataagcccttttgaaacctaaggaacataataaaaggtgacatattcatttattcattcatgaagtattttcattcacccgttgaaacatgtcattttcttttccttcatttaaaacaagtccatttattcatcattgagctcctattacacgtagtgatcactatactataacatagtgccttagtgtcaagctctggagtagatggctccacaacttcttacttatgtgatcctagggcaaattaccctcattgagattcagtttcctctcctgtgaaatggatataagaaaaatgcctgcctcataaggagtcagtgcacttagaatagagaatggtagaaaggaagcatctgctacctgttagttttcagtatatgccaggccatgggtttgtattggtgggtaaaaagacatgttccctgttcttgaaaaacttatactctaagtagttcagatacgcaaagaattatagcttttaaaaagtatgcaaatcagccactactatttttgagttcacagcttggggactcctactgaagtctgtagattggcaggacctgcttcggggcagccatgactggcacctattgtaggaagtgctctagacacaccccaatgtctcagttccccggaagcctgtcctccacctcataccctctgtgctttggggaatccacctacagaattatactgaataaaaaattaatcttgccaaattgcctgatggccagatactaacaccaacacctacctcccctttcatctctcccctcttgcccatacatgtcacctttagtatttgaagatagcctaactaacaggaatttttgaagtatgtgccaatctcaggtccacaggtatgcaatactcttggtaaagcacttgaattctatcattacgcaaccccagacacctactttttgtattctctgtcatgttcaattagtacacagaaacttactgcctgccagccaagagcctttggtctctcattttgtaagagaataaagcttttccccccttgaacattctattgtctcatgaattctgatgagaatggattcctttccaaatataaaatcagacaaatgtgaaagcatctagaacagtctctggtccaaaggagatgaaccacagtacgtgttgtttcttttgtatagatgattcgtcaatctcactgctaactccaaacaacttaatttcaaagaaggaactcccgacactgacatggtaataaaacaggtagccattctttagttacttggcaatttcttgctgatttcctagccaagacctgtagggaaacaggtgctagaggagtatggtaaaccagcctctttcccctgtgactgctgattttggcaaaggccacagtaaatcagtaaccatcagggtgagggcatctcagacccacatgcaggtttattttaagcttcttggctggcaccactgagactgctggatcatctccatgttgtcaaagctaacctccaatacccctaagggtcttatcacctgcccccaagaacatcaggccaatctgatcaagcattgctcattttcaaatccatcctagggcaaatggatgactaaatgttaaggttcatattcaggaaatgtcattgcatttttgtttatcacagaaagcatttgtgtaaacaggtgattttgcacattgctttcttagtaccatactatttttgaagccccttcctctctccttccctaccttctcgacaacgttcctgggttgtttcagtgctgctttccaacactttccaatgttgaagtatcaacaagtgctctggtggctaaaacagtctggggtcaacgcagtaaacccaaggacctgttctggccctggccagttggccatgtgataacaaacagcacttttgaagcaagcccagtgggtggctaaatggagctccatctagaaacaggaacaaagccaggccagaggagaatcaaggttgagatactaaagaatctcctccagttgtaccagcagttggtacctctgcagaagggtagtttatttataatatacctctcactgaaccatacaactttacaaccagaggacaaaacttatacctgtaaatgagattatttcaaagctatcactttaggaaggctttattctgatttcaaaaacaccttggcattcaatacttatgtcaaaattcttttgactatatttagtggtggcaaataccagtttttttgagagtgggtgttatttttagaaatatccaggtcattcagaactaagaagaataagatgggaatcaatactattctggtataaaaccaaagtgttggttatagtaaaacaagttggagtttcctgtgcagatctgaaaacaatttgaaaagggagttttaaaagtgctctgaataatggcaatgtcagtgtggaataagggttgctactaaggtaacagctttgaagaggtcatttgatatggatgttggactctgttttttttttggagatggagtctcactctgttgcccaggctggagtgcagtgctgcaatctcagctcactgcaacctccacctcccagattcaagcaattctcctgcctcagcctcccaagtagctgggattacagatgcctaccaccacacccggctaattttttgtatttttagtagagatagggtttcaccatgttggccaggctggtctcaaactcctgtcctcaagcaatccacctgtcttggcctcccaaagtgctgggattacaggtgtgagccaccgcacctggcctggatgttggattcttactactctatttcacaaccattaaaaaaaaaagctttttgttttttttgagacgggaacttgcttactcgcctaggctggagtgcagtgatgcatcactgcttacagcagcctcagcttcctgggatcaggcaagcctcctgagtagcagagactataggcaggcgccaccacacccagctaattgctttttagattctttgtagagatgaggtctatgttgctcaggctggtctctgggctcaagcaattcttccgccccggcctcccaaagtgctgggattacaggcaggagcccaccaagcctggccaggaaaaagttgataagacaacagagaagtctagtatgtacttcatttctgggtcataaagcagaaactcttaaaattccactcacagcttcagttaagtgggtctctatgtccacaaagtaagggttaagaggcagagatcctccatataaatgaatttaaactgatattctaaggttcaaagattctccattctattaataacttattagtacctaacaatagaatataatgcacttgggggcctgggtctcctacttgctaggagttcttaatctaaaacactgacctggacatgtcgataatatcaagaatagctaacacttatataacactacatgctatgtactttcttagcaagctatatatgtcaactctcttaatacagccctgctattactttttacatttttatcttatatgtgagagaatgaggcatgcagagttgcccatgaccacacagaaagctgcagagctgggaatggaacccagccagcttggctccagctgcactcttaatcactaggctacaccatcctatgcatctatgaagaagaaaccagatacttaaattaaatgacaggaagagtagtggagaatatttgcaatttatgggaagcccatttgagaagcaaaaaggagaggatgaagggaggcagatggacctgtaaaaactgggatgaaggccagacagactagccacaaaagttccatgggtaacctggggatgggcaaaaacagtctcctctagtttatttagagaacagagaatacagcaacttgaaagatccaggagttataaaggaccagtttgggtatataacgttttttattacataaaaagaaattcactccacatcattttgtgaacctgactggctagtaagaagttatgtgtaataaatcaaagtcaacttattggtgaacactagggaagataagtgcaatgctctatctgccactgccaaggaagctttcagaagccactatcccataaaagggatgtatggatgtaagtcactgaagagccctcgaagatatcttgttttaccacagccaataccaatgccaccttaagtctaatctcatctgaggtggaaacaatctcatggaacagaaatgggacttagagcagggaatgacttggatgaaagttttctgactccaagtccagtgttctctccttgtaaccattcagggcaacggaaacaatactgatttcaaaactcctcagagaacgtgagcacacatctacgctacagagataattccctcatcacaactccctcttgctgctgtctacacctgcttcctctccctggggcgatagaaaacatgatgggcgttaatgctcctaaaatctgcaacgtatcaaacgaacgaagcaacagctactctcgaggttctttgctacgccttgtaccgcaggctggggtgagccgcagggagttgaggttcccgtgaggctgggagccgctcccgcagcctaccctgggaagcccgcacccaaccgcgaggcgcaggggaggcttggccgctgggccggccacccacaccaccgcatccccgcagaggtgccagagattctaggaagcctgcacggcaggggagcagcccgttcctcgggccccatgcacgcgaagacattggagccggccgaggcgcctcccctctcccgaccccgcagcctgctcagccaacgccgccgagctccacagaccaccgctccctagcgccgcgcagccacaccttccactcgatgggggcggggggggtcacgtgaggcgggcccggggaaccaatgggcggctcgcgccgaatggaagggattgtctgacccccgtgacgtcacaaagctggcggggagcgcgctcctcttccgcccccgccccacccccggccgcagccctctccgcctccccacccactcgtcactgcgcagccaatcggcaggcgggaagcactccggcccgaacgtgcgggcggggcagggtggcggccccgcacggtaggggagcagagtgggcaggccgggggtgagggctcgcgctccgggagctgcacggggctgcgtggaaagagcgccgagcggtggcgtcgttgtcgccccctcctcgtcgggaagaatcgtttggtctcctgccgtgcccggttcgtattccctactccctgccacgagccgccccgtccgggatcctccacccgtccaaagttgtgagggggcgccgggcgtgctcgcggatcggcggccgcgggcgtgcggagggctggacgagccctggagcgccaggtgcgcgccgggcgtccgggctgtggggcgggcgtggcggcgctgggggccgtcggggggctgggggcgggggcgggggcgccgtgcagccctagcgtcttccggcccctgcgctccagctgtcagcacgaagggcgccgcggggccggcggcagagtgagctccagggaggctgtagggctgcggcactgcctgagggtctccctgacgcaccccgggtcagggctggccccgctggcagcctgacaccggccggcccctgttcgtctggactgaaacgggcacccctggggcggggccgggccgggcagggcggggcgggcagcgggcggggctgcagtccatgggcttcgcgccccggctggatggaggggctggcggctggccctcggggcgcacccctgctcgcgcctgggccccgctgccttgggctgtggctttgcctccccggcggggtgggttggtttggttggcttccttgttctctccacccctttatccctcctccatcctcttcccccccacctcccagcccattcaccgggctggagcgagacctcgcccctcctccgctcccgcctccccgccgccgcctcctctaatgagcatctctgccttgctttcaatgggccggtgctgctgtcgctgctgctgcccgcgcgggttgtggatgttgtcggctccgtgttgtgatgacaggagaatgtgtgtgtgtcccgggcccagacgaattggtaggtattcacttaactacctgcgttgggtacccaggaaggatggtgacagatttttgtgtatggatggttttagatgaatcagcgtggtattaagggatgagatagattggaaaaagggacaaacgcgtcttggattgagatagctttgatgtctttgtgagtgcagtttttcaggtagcgacaaaggaaactaatcaaaaaaatactggcgtgtggtgcttcgtatctttcttcatttatgtaaaaagatagcaggagctgtgaaatggctaggcatttccagaaaaatgttgaaaaatcgcggatggtctttatgtagagtgtttaatgcaatcggattacataaactggggttccgacacattaaatgattagcatagcttttctttttcatttacatcagaagctttgcaaagctaaagggctctggagtcggtgccttaatagcatttgctaattaatttggtccgtgggtctattgatggagtggaaaaaatgtcttggcacaggctctgctaagcacatcagtaagaatggacggctctctttcctgtttctggttgcagtgcatctttctttattagtcattggcaaaatcagcccaatctgcctgggatgaagatgctacatacaacgtggctgagtctagatcatggaataggaaattttccgtgaaaattgtgatcaagaataacttgcaaatttgacactgctctgttttaccaacagttgtacctggatgctgttcttattgcctgatcaagagccttctacactaatttaacaagcttgtcagcaaaagttatgatgtagagtgttttcttgttgttgaatcagtggataatctgaaggatattaagagtttttcattgcttacttatttatgaaagcatttgaaagtactttgactcccaagggtatctgatctgatggagagaatgtatcacttgtaccgatgcggatagaacgctcattaattacagcacagttttcataaattccaacttccctaggaattttgtcttttgaaggcatgttggaagttggggcattaggatataatctcagtccatgtactaagcctctgcataactgaaagatagagtcaataaaattcactctctcattttttgtttttaatctcaagaatttttgccttgaaggaaaaatgtagtggagaatttgatgtttgaacgtaagtattgttaaaagcacctgctgtgtcaatcattgctttttgtcactagatttcattcattttgcagtcaattacaaaagtagaaaagatgtcataccaagccgggtgcagtggctcatgcctgtaatcccagcactttgggaggctgaggcgggtggatggcctgaggtcaggagttcgagaccaacctgaccaacatggtgaaaccccatctctactgaaaatacagaattagccgggcaggagaatcgcttgaaccagggaggcggaggttgcgatgagctgagatcacgccattgcacttcagcctgggcaacaagagcaaaattcctccccccgctgccctccctccccccccggcaaaaaaatgtcgaagcaaaggaatttaaggaaagtgcaggtttccaggacttgttattccttaattaaacaatcaaaccctgttatgcatctatcaaccctccctcccccccacacaaatagtattttgagtcartttacgttccatacaggcacattttcattgtttttttctgtaagattcttaagttttaaagaaagagcaaatgcagtcataaaattatgaagaaaaattcattaagattacattagtttacatttttaatgatagaaaacctttattcaaagcacaaaatgagttgatatgctttctgcacgcaaacctaaaaagagatatggtttaagtatggaagccactgtcatgtggcccaacatttgagcacatcttctggctcagtcatgtacacttaacctctggatgactttcaggtattcagtttgaatttcttttatttaaatggttactcctgatggattcccgtttttctggaatttctgtttttcattagtgcatttcagaatgcttttttagttacggattcttatttccaaaattttagccattactttctattgcctgatcttgtcttcattttcgtaaacaaatcccttcttagatagtgcagttaaaatgatggtactttctactacttgcagaagagaatctgtgtggctggcttatgcagtgcttattacagaaacaaacaagaatcagtgattattcagtgtttagttttctttgcttccctctaccccaatttattactttttctcaaattattcttcaaaaaaggtacatgaaaataatatatggctgacacatgctatgatatttgtttagccgtgggaaggaatagttgctattaactcagatggttttattttctgtgttcctttttgtttattgcatttgtttatttaaagtatttccaaagtgtttctttatagtacaaatgactattttgaagcagtatctcaagaattcagggaaaatatatgttattgaggaagaagagggattttttttcttgcccaaattatctagattaatgatatattcattaaatttcccaaataaatgcccagaaattattttcagcgcayatagtgagtgataggattttttttaagtttgtaattatattgctgtaccttttcaatccaaaccttagactattatttgactatactgcttccctggagcaagtaaataccttttttttttttttttaatgtgagagaaaacatttttggtcttttaaaatttatttttaatttacaattgacacataatattatatatttatggggtacaatgtgatgtttcagtgcatgtatatattggtagacattgtgtaatgatcaaatcagagtgattaccatatccaagaaaacatttttctaggggttaattctactttggatccatagtagatgaaaatacttctatgggttttccttatagctgctaagcagggaacaytgttagtaggtaaattaagttctaggactgaaaccatttatgttactaacaaagctttagagctactgcaatacttaaactttttttttttttttaatcatgaagggcacggtagaattcaacagtgaataaatgaaacctgaattttatttaaaaacctcacttccataagcataaaggcatgaatcctagaagagccttwgatagcatctgctctgttgatgttcctttacaggttagaagagtgagactcaaagatgtgagctgacttttccaagattatttgggagttggtggcagacctatgcccgttagcctggcaaattgccacagtggactagagaagcaagttttgcaagaccatctactggggtacaggagagaaatactggaatttctttttttatttaattatgtagaaatttttctatatatgttacaatgcatattactgtagtcatatatgtatatgatgtacacgtaattcataaatacacatatgtttggctgcctcttaacatttttggtcatagccatgtgtaatcatgccaaaaattgaccacaggtctatgtaaagggtcttcataaatggaagaagtccctgtgtaaaatgggagatttcaaggcattttttaagaatagggagggagaaggatgattggtcaggtagacggctactgcataatgttatataaccttcatctcctcagctttccccagccaaatctgttgtacattctgcacagtttgtactgcacaaaggacgacaaagaaaagagaaaattgaagtttgagtataggagccaggagttcagtcgtggttccacgaatgattgggagttgtgcctgccagaatataccctgtagaaatagtacatgatgtgtgtataaaatgtagtaccttctagcaraggcttaacatgtagattgacttgcttaatatttgttataaaggcaaagctagattaagtatcctgaaatgtaactctttcctttgtgtacatctgtctaatttgctgtctaggaatcccagtcagaagttccagcctgccactgttctctgatgccatgccagcaccaactcaactgttttttcctctcatccgtaactgtgaactgagcaggatctatggcactgcatgttactgccaccacaaacatctctgttgttcctcatcgtacattcctcagagtcgactgagatacacacctcatccagcatatgctaccttttgcaggccaaaggagaactggtggcagtacacccaaggaaggagatatgcttccacaccacagaaattttacctcacacctccacaagtcaatagcatccttaaagctaatgaatacagtttcaaagtgccagaatttgacggcaaaaatgtcagttctatccttggatttgacagcaatcagctgcctgcaaatgcacccattgaggaccggagaagtgcagcaacctgcttgcagaccagagggatgcttttgggggtttttgatggccatgcaggttgtgcttgttcccaggcagtcagtgaaagactcttttattatattgctgtctctttgttaccccatgagactttgctagagattgaaaatgcagtggagagcggccgggcactgctacccattctccagtggcacaagcaccccaatgattactttagtaaggaggcatccaaattgtactttaacagcttgaggacttactggcaagagcttatagacctcaacactggtgagtcgactgatattgatgttaaggaggctctaattaatgccttcaagaggcttgataatgacatctccttggaggcgcaagttggtgatcctaattcttttctcaactacctggtgcttcgagtggcattttctggagccactgcttgtgtggcccatgtggatggtgttgaccttcatgtggccaatactggcgatagcagagccatgctgggtgtgcaggaagaggacggctcatggtcagcagtcacgctgtctaatgaccacaatgctcaaaatgaaagagaactagaacggctgaaattggaacatccaaagagtgaggccaagagtgtcgtgaaacaggatcggctgcttggcttgctgatgccatttagggcatttggagatgtaaagttcaaatggagcattgaccttcaaaagagagtgatagaatctggcccagaccagttgaatgacaatgaatataccaagtttattcctcctaattatcacacacctccttatctcactgctgagccagaggtaacttaccaccgattaaggccacaggataagtttctggtgttggctactgatgggttgtgggagactatgcataggcaggatgtggttaggattgtgggtgagtacctaactggcatgcatcaccaacagccaatagctgttggtggctacaaggtgactctgggacagatgcatggccttttaacagaaaggagaaccaaaatgtcctcggtatttgaggatcagaacgcagcaacccatctcattcgccacgctgtgggcaacaacgagtttgggactgttgatcatgagcgcctctctaaaatgcttagtcttcctgaagagcttgctcgaatgtacagagatgacattacaatcattgtagttcagttcaattctcatgttgtaggggcgtatcaaaaccaagaatagtgagtggctctttcactggcaattctcaaatgatayacatttaaagggcagattttttaaaaagatactactataataaacatttccagttggtcattctaagcatttacccttttgatactctagctagtcaggtactccaaattgactttgcagcagggtggcagggtcaggagagtctggtcctgcctagctcagatttcatggcacctgcacttgaagcaagtcacttctttatcacaggtgtcttgaaacattagcttcttttaccaacctgagaaaattaggatgacctggcaaataagatcttgaataggccaaaagcaagtatcttgctgtgtgtagtctcttggttaaagtgaagaaacagtactgttcacacctttcttcactgagattccagtgtacatgagaacatatatttattgcatgattttctagatacacagtctatgcattattcatatacatttattttagcctaaagtggttttcaaatccagttcttcaagccataaatgaccaagatccaagcaatctgaatttgtttttgtgattatttgactggaatgcttcttaagtggaataactatactccgttatccacccgatttcctaatgtaattgaaasattttctattttgccacacacttggagacaataagggtttttagttttatctactcttctattgaagttaaagaaagaaaaaaagatttttttatttgtattaatgaaaagctttagtttaaaataaggagatccagaataaaaagaagagactgatctcttcaattattgtcatctgtagccaccagcacatcactcttatgtaatccccaaaggcttggcatgccgtaagtgtgtggtgggtagactgctgccggggaatcgtacttcttatttagtaatgataagacttttcattatttttggaattttaaagatgacataaataagtttaaatatcaatttggggagtaaggtttaatattgccatcgggtattgagacaggaggaagtttctgtttttctccatttagacataggtcaattaaaatatttgggtttaaaatgactaaatgctttaaacatattgtagcttaagatatatgtgttaagatatatacatgagaaactttaaaaggtaactactgtgcatgcctgatgcttaatagaatacttagtggcatcaaatgtttgcagcagtctccataattatattcagtcccttctaatactgtatcaatgtaaatgaaataaatatattcaaattggctttttgatatgcatcaagtggcattttgttcctgtgtttaatagtgatctgtatacagctgtgcacatattgtcatcacttattctagcatcactgttaaggctgtgattatgtttgatattcacctggattttaatacaagccaatatcagcttcccattgtgtaataacttgggtgtttaggagtcttttcacattttttggggatatgaactagatgttcaagaactccttctggactgtggatactgaatcagtgtactattggctgcagaatttgtttcaattgaaaatagactcaggaagattgctgctcagaatatcatataatgtttattttttgaggtgtttttgtttttatttgtgtgtttttttttttttaagtcagcttggaacttttttcctgggtagtatttgggagagggaaaggctgtactatatatttatttctaaatgttttgactgggcatttttcttttaatgaaatatgtggactgctctagcaaaccctattttcagctactatttgaatattcttgaacaccaccactgaagagtttcatatacaccaaataatgtctcatctctatagtacagggaatataaaattggtttcctgtggtcatgatcaagatagtagtattattacacaagaaacttggtctgcagtctggaagcttgtctgctctatagaaatgaaaatgcagcatgaagttgacattgtggaaatgaaagtaattgggtattagaaatctgaaagtactgtcatctaaaagcaattgtgattttattgtaattggttgtcactgttgtacggtgtctagaattaaagaatacatgtaaactttcatggtatttagcctttcttaaatttttttaaaatttaaactttctaacctatgtattcaacttctgtatttatatttaatcagtggttcatgttatataatacacccttaactagttaaatggaatgttggtatggtacagagtaccatattgctaagaaaactgtcttataaaagatgtatatgtgtgaagacatgaaagtttaatgtacagaatggttggagaaatgcctatggtgaattaaagcttcatatctgctttctgaatgtcctgtgttggtttttaataacaagattgattagatgcttcctatgtatggtagattatatttaattttaggacccagtagatacatagtacttcaaatttgtaaaaattgaggtaaaattttttttcttttttttttgagatggagtctcgctctgtcacccaggctggagtgcagtggtgcgatctcatcttactgcagcctctgcctcctgggttcaagcagttcttctgcctcagcctcccaagtagctgggactacaggtgcgggccaccacacctggctaatttttgtatttttagtagagatggggtttcaccatgttggccaggctggtcttcaactcctgaccttgtgatccacccgcctcggcctcccaaagtgtttggattacaggtgtgagccaccatgcctggccaaaattgaggtataatttaaacaaaatgcacagatttaaaatttgcgatgtaacatttggtaacaccccaacaaagatataaaactttttcttcagaaaattccctatgcccctttccattaatccctcccctcataagtatcattccacttctctcactataattttgcttctagaaatttatataaatcatacatgtacttttttttttttttcagacagtcttgctctgtcgccctggctggagtgcatgatctcggctcactgcagcctccgcctcctgggtttgagcaatcctcctgcctcagcctcccaagtagctgggactacaagcatgtgccaccacacctggctaacttttgtatttttggtggagacgggatttcaccatgttagccagactggtctcaaactcctgacctcaagtgatctgcccacatcagcctcccaaagtactgggatcacaggcgtaagccactgcacctggcccacatatgtactttttatgttttacttttgctcaatttttggagattcacttatgttgttgattgtattcatagtctgttccttattactgggtagcattccagtgtttgaatgtatcacaatttatccattctctattgatggatgttgtcagtctccccctgcccccctttaaagataatttttagattaataattctcagaaatgctgtttggttaaggtgtagctttaactttgcaaataatgattacaggtaagttttctgttaaagctttgatgataggacccttaatgcccttaaaacaaatggtgggaatttttcatggtgaaaagttcagtgggattaaggcgtggccctttgctattggcctctttgttcctctcccactgagaagtttgttgagttcattaagcttggtagatgattgtgttaatgacaaattgagaaaatggcaaattataccttggtgggttttttgtcttttttaagagagtctcactctgttacctagactggcatgtagtggtgtgatcacagcttattgcaacctcaacctcctaagctcatatagcttggtttttgatggtttgggtttatcactgcattggccatagctatgactagggatgaggaaggaagaggatgaagtgctgactgttggggatggggtgactgacttgagtatttctgctttcattaaacaaagttaacactgcttagaatgagcttccatgttcactagtcaaacaaatacctgaatgtgggttgttcatttgtccttgggtatagcaagaggatctaggtaactgttattctctctataggttgacatatttaattctgacctttttcataaatactagagcaatagctattcattgtagagtttttcagaccttcaaaagttacattctgttaaaattgatgcagtggtgcttttactacctaaacaagctgaataaatgaagacgttttatggcatcagaattggcttgttacagtatgaaaatcatttcctgttttcctttcagaatgtactttaaaaggcaagcttaaacctattaaatcctgtctgtccagttcttacgacaatgcagtttataaccctggattgaatcataatgcatagcattattttctaaatagctctcaaattacaagtcttcaaaacaaatatattaggaatgatgaaatttgtatactccatatgccattaaaaatggttatccatggccaggcatggtggctcacacctgtaatcccagcactttgggaggccaaggcgggtggatcacaaggtcaggagatcgagaccatcctggctaacacggtgaaaccccatctctactaaaaacacaaaaaattagccgggcgttgtggtgggcgcctgtagtcccagctactcgggaggctgaggcaggagaatggcgtgaacctgggaggcggagcttgcagtgagccaagattgcaccactaaactccagcctgggcgacagacagagcaacactccatctcaaaaaaaaaaaaaaaaaaaaagggttatccaatgcatgtatattaaggtccacacaatttaggctcagttatttagccaatatttaggttcataaatggtccccatccaacccttgactcccagaagctccctatgcacagaatgagagaagcgttcctttgagggtccaccaggaactgtagctgctatttgtgagtatcaggtacccagctccaaaaggactggatatttcatcttagtttatcttactacccctacccaaaggcgggtggaggagacagttttctatccaggatcctgcccagactcatgagttctctgcttttctttcttttcttttcttttttttttctttttgagagagagcttcactcttcttgcctaggctggagtgcagtggtacaatctaggctcactacaaccgcctcctgggttcaagcgattctcctgcctcagccttccgagtagctgggattgcaggcatgtgccactacacctggctaattttgtatttttagtagagacagagtttctccatgttggtcaggctggtctcgaacttccgacttcagatgatctgcctgcctcggtctcccaaagtgctgggattacagacgtgagccactgtgcccagccagttccctgcttttctaaaatatacccggttcactgactttctgcctgtaacagatgctcaaagtgcacaaatactaaagtgtgaggttagtgatcacattcagcctttcagaaactttaaaccctgggcactagcaacaagcagtcaagaagagtcaactaaagattttatctcatctgtggcgatgaaccagattgtctttttgaaggccaggaactgttttatttgctggcagtgttgcctcagagaccagccttccagcgtgaacactgagaagaatgggaaatgtgacaagagacctaagctgggaaaaacaagaaaagtgagggaagggaaagaatggtattggcaattgctgtagtgattacagaggcagtaatggggtcagggagcaccagatcctaatactttggaacagtgacaaggatgagagcaaagcaccggaaagacagcagtgagctaaatagtaacaaggtaaaggactttaaaaatcatttttggccaggcacgatggctcatgtctgtaatctcagcactttgggaggctgaggtgggtgaatcacctgaggtcaggagttcaagagccccctggccaacgtggcgaaaccccatctctactaaaaatacaaaaaaattagttgggcatggtggtgcatacctataatcccagctacttgggaggctgagacaggagactcacttgaacccgggaggcggaggctgcagtgagccaagattgtgccactgcactccagcctggtgacagagcaagactccgtctcaaaaaaaaaaaaaaaaggccgggcacggtggctcacacctttaatcccagcactttgggaggccgaggagggcagatcacaaggtcaggagattgaggccatcctggctaacacagtgaaaccccgtctctactaaaaatacaaaaaaattagccaggcgtggcggcgtgcgcctgtagttccagctgctggggaggctgaggcaggagaatggcatgaacccgggaggcggagcttgcagtgagctgagatcacaccactgcactccagcctgggcgacagagcaagactctgtctcaaaaaaaaaacaatcatttttcaacccttatgtgcacatattttatggtagggcagcagcaattgacattagcatggccatttagtcctggtccattagataagcaaaaaggaaagtctttgaaactgaccacatggagagggatctgtggtacccagaaggatagttttctccaaagaactttgcttagaaattatttttctttgctccaaacctgtagataagttaaatagcctaatttagcctgatgaaaacagagatgggatcattaaggccctggtgtcagtagagacagagctgtgagaccragcaggccagagagaatgaggtttattaaagcagggccttgttgaccataaagtcagagccctgtggctctgggcataaccagaaaacacactgatgttgcagccatactaatactaacagtaatcacaaccgttgtttcttgtgtacctactatgtgcctggttctgtgaaaagtacactgtgtacatgttctcattttatccttgtgccaggtagtgtctggcccttcaatcccttctctggctgtccctgccctgctctgtggaccaggaagccagaccctacaggctgtagctcccagggctcatttgcctcctgattgccatttcagttcaaccaacaggtaacaccagcagatgatcagagggtgggatgagagagaggctgggatatttcttccttattccctccatgctgtgggctgcatctccagccttagctgtaactctcacactgtactgctcgtcttccatgattccaagcctcagtgggcccaggtaacattattttcttccgttgtcctttcagccttagggagggtaatgacttctactgttgctagtctcctggtgccccaccatcctttgtttgttcctttactcttgttcaaatctctgtaagaaatccattcatttgaaacatctagggtgaagtcagtttcctgctgagacctgaccaacataagcttcaaagcaagctgaagtattatatcctctattttagccagcacaaagaggctaggtaacacgtccagcatcacacaccaaacaaattcacgtctgtgtttttcaaagccggcatgtttaatcaacacagcatgctgcctggcctctccatgtaaccagaatgattcctttggaatcgagaaagcctgaggcctaagtggccaataagcaagtgattccttgagaagcagaaaccaagattgacatagcccagcagttaacatagcacacaaggaatggagccccacacagatggaaggagtgagctgggtgcagaaaaaacagaattatggttttataggttagaaccagttgtttctcacttagcagtgcattgcatacacaggtacatgtttcttagtgccttgtttcaattgtccaggcactgaggataggtgttaggggtgaaaggtggttaaaaggtagggtctgccttcaaggagctcacagtttggagggaaaattaccattgcataaaataataattaccctttggtaattagggatgattcagaaactgagacaaatacaaaatttcaacaataatccagaaaaaagagtgactctgtcctgatgtgccatagtgacaaggcaggccctagagagtcagggaagtttcattagaagggacagtgcttgagcagagattttaaaggggaaaaggggtttgccaggcagaaaagaatccaggggccaggcttggtggctcacgcctgtaatcccagcactttgagaggccgaggtgggtggatcacctgaggtcaggagtttgagaccagcctggccaacatggtgaaaccccttctctactaagaatacaaaaatta

SEQ ID NO: 94564 - DNA, 122358 bp, Homo sapiens
  misc_feature (1)...(122358): n = A,T,C or G
ccgttgctggccccaactgatgttatgacttttgctagtttaacattaacaggcagttctggttgcatggtcacctggtggcttacggtcaggcgttccatctctgtcagagacaagtggcataccagaagacagatctacacccgcccgccccccaaatgcatacaattctctgctccaggtggcatgacagaatctctacattgcatcattctgcaccattaataacaccaaaaaaacacctgttggactatatggcccaggcaatagcattacttcatcacaacccggatctactgtacagacgtttccagttctgggctctttccaaaattggaaatctcccaattccactagtctctggaccagagcaatactcccaggtgtgggacatgctgcctccagaacctgaggcaagaactagctcgagaaccaacaagcgtcttgctttcttaacggcaggaggtgcaagcagcaataattcattcgcttttggaagggatgccctagagcacccctgaccactggagccctaaaaatgttaggattgtagcaggctcctggattcctgtagggtttatatgccactctctggagcagctgtctccaggatcttctgcacttctcatctggctgatcaacatgtcactgatgtaaaggaacaatgtaatattctacaggatgtctaggtggtccagatctctttggattacgacagagagcaagagaagtaacataaccttccggcaaaactgcattttaattccatgcaaatgcaaaatgtttttgatccctgataggtacagaaaagaacaaatccacctagtcaacaactacctaccatatctggcagagaggctattacggatactttttttttttttttttgagatagagtctcacactgtcacctgggctggagtgcaatggcatgatctcggctcactgcaacctccacctcccaggttcatgggattctcctgcctcagcctcccaagtagctgggattacaggtgcacaccaccacacccagctaattttttgtatttttagtagagacagggtttcactatgttggccagactgaactcctgacctcgtgttccgcccaccttatcctcccaaagtgctgggattacaggcgtgagccactgtgcccggccagggatacttcttagatgagtttgcagcagtgtacccaaaacaactactggttgacagcaaatagagtaggctgccattctccaggatccttgtgacttctgcaggggtcatgctggtaaattaaaaatgttggtaaccaccactttacatcacttggatccttagaagtggcacttatctctgccattcccgctctgggataattgttttataatcttggtaggggatggggcagtttcaggtttctgtttggctttttccattttgttatctaactctataggtcagggacctggaatgagcattcactgccaagtatgtcaatgccaattactcactcgaaggctaagaaaatatcactagatcagtccactaggtctatgggtccactgtaagctggacctttagcagaactccatcaattacctggccaccacatgcagccactctaacagaaggggatgatattctaggcatctggacatcaatttagaccctgtgtccacaagtcttccaaatgtttggctaatcacttttctccaggatgtagttatcaaaagaaattgctatcagaccctttggaaaagtacctggggattcatttctgttgtacttgtactgttataggtccttcttcctggtgtttggccacctctcaagtaatgtttccatttctgaaaactggctcagttccagaagctgggcatggaatcctgattttttaaaactgggacaagcatctttatttatttttttcaattgagacagtcttgccacattgcccgggctggagtgcagtggtgcaaccacagctcactgtaatcttgaactcctgggctcaagtgatcctcccaccttagcttccccaaatgctgagattacaggcacaggccaccgtgcctggatggatttttttttttttttttttttttgccagctgagtagtacccttcttagctgcccacctgttttgcctccagggatgccatgtttattgaccagttctataaccatacaagtgaggtccccttggctgccactcagaccctgctggctgctataattgcaatcctctgacttctgccagctaagtgttgcctttggcttcttgggtttttttctttggtccccactatgtcccagaatggcctcttttgtcttaggatcctatcatccccagtgctatcacccagccaagttctggaacagcctttctattgtcattcttgcctacagagatgagccatcactgaatattttagtgacatcagtgcccctttcatcatcctatgtctaatgatctttataaatgacgtgttatttacaccttcatgtggaatatgatcgtctcaaatgtcttctagatgcacggagtatataaatttcaacatgcccacacccctgaaccttttactcccttccaccactgtctgccatagcaattttgccatttcaattttgcttaccatggcccatggctttttccaagtgtggtgttttaaaaatatactggcaaattttttgatattcttccctttagaagatgaagcctaattcctctccttttgaatatgggtaatttagtgactcatttcttccaaataggaagtagccgaagtgatggtatgcaacttctgaggctggttcacaaaaaggatacagctttcttttgtcctttgtctttagattgcccttggaatccagccatcatattgtgagaaagcctcggccacagggaccggccgtgtaggggtgtgctggctgacatccccaatctgggctgcagccaatctccagtatcagctgtcagacattcgagcagatgaaccttcactcattccaacctctagcctctgaactgctccagctgaggcctcagacactgtggaagagagataaccaatccccactatgtctgacccacagtaacctagagagatcaccgatccccactatgtctgacccacagtaacctagagataagaaatgattcttgttttaagccacgaagtgtggagtaatttgttaggcagcagtagctataccgccattctaggagccatccttgcaggaagtctgcagccactctttgccaaggtgttaaatcacgtatttcaataaacacatctatgcaagtttacattccagctcccttcatcaagcaccctcataatccagccccaaactttcccagctcctgtcagtacatgttggctgggtggtacagcttgttatgggctgaagtgtgtccctctcaaaagatgctgaagccctaacccctggtcaatgtgaatgtgacattatttggaaatgggtctttgtagacaagttaagatgcgctcattagagtgggccctaatcagtatgactggtgtccttctaaaaagaggcccatgtcgaatgacctttgtcaatgatgttacttatgccttcgtctggagagacacacacaacaagatcaccatgtgaatataaaggcaggactgggacaatgcctctataagccaaggaaccaaagactgccagcaaaccaccagaagctgggagagaggcatgagacagattctccctcccagccccagaaggaaccaaccctgtgaaaactttgatctcagacttctagcctccagaactgggagacaataaatgtctgcccagtttgttactgaagccccagcaaactaataacgcagttcttctgagggggagggagctatattctcttttctatctcattgtttccagctgaataatgcaaaagaaacaaccataattatacatctactgagcagtaagtggagggaggaggagtagtgtcaggttaataggagaggtgagccaccccggcaggcttcaggttcaaggcaggccaggtgtgatggctcactggagcctagaagtttgagacaagcccgggcaacatagcaagaccttgcctctacaagtaataaaaaatgtatccaggtgtggtgacacatacctgtagtcccagttacttaggaggctcaggtgggaggatcgtttgagcccaggaagttgaggctacagtgggccatgatccagcaactgcactccagcctgggcaacagagtgagacactgtctacgaaaaaaaggtttaaggcagtttggggagtcaaaacctttgaaggcatctacccaggtatctccaacccatgtatgacgggcttttcttttctttcttttttttttttaaaagacagagtctcactcctgttgcccaggctggagtgcagtcacagctcactacagccctgacttccagggctcaggtgatccacccaccttagcctcccaagcagctgggaccacagccgtggccaccatgcccggctaattttttgtgttttcagtagagatggggttttgtcatgttgcccaagctggtcttgaactcctgaactcaagcaatcttcccgccttggcctcccaaagtgctgggattacaggtgtgagccactgtgcccagcctcatcttttcttagcagggatccaaacttagtggaagagtattgccttgtttgggtgttttgctatttttggagttcagtcaaacagggatgttaattcctgggcctggttcttgtctttgacctgctgcagtaaatgaagcttctctatatgtaacgggacagattcactggcttacaactgtttgttgcttgccttcagctgaccactattcttaagagtctcggttggcactaagcaatagctatccaatccccctttccttccttttatctactacgttcaccatatatgaaatgtctgatacttcacccactcgtggattccatttcactagttcaccctcctacttcaccactggtgagtgatgcagcctcgaatcccatcttctcaccagctttaatgctgcagaatggtttctccagaagcagacgctgcgactgagtttggggtacgaggatgttgacatggtatcaacacccgtgaaaggaaggggaaggaagcaggactgggcggaggaagaagggtatgtaagtcccgcaaagctttggccaacctcgtgtggagctctggaacgagaactgctgaagttcgccagactcgggcactcctgcctaactcagtaacaggcgggcggcatcgggacacggacacgctgctcaggccccgccacagccaccctcgcaccgtcagacacactcccacacattcggggagcagggccttcaggacgccggcggcgccctctcagtctagctccgccaggcccctcgtccgtcctcccgccctccaaggtcacctcgcggtccgacatggctgctggggctccttcggggccaacgatgtgtacttctagggctgttttttaaagcaaaggagtgaacacaggtaaaggcacgagaaaggtgcctcgacgccaccacggactgcgcagcgttcgcgatcagcacagcccgaaagggaagacagcggtcaacgcggacgcgccatggcgcggggaccaaggaggagccccgagaggggcggggctggccggagggccgcgcgcggggccaccagcggcgcctaggggtcagcgccaacgcccacgggttggtcatccccacttaggcgcctcgggccgcaactaagcagcctgcccgcctcaagcccgccaccctcaagcaggcccagcgcagagcctgtcgggagcggcgctctcccgcctctcccaatgggagcccggagcggcatcgacgcgtcttcggggccaatggaagcgaggctctggtgttgctgggcggggccgggagggctgcgcgggcccgagacccactgcgcacgcgcgctcgctacccgcccttcccgccgcgcacgcgctcccgtgtagggccggccgggcgctcaggagcgcgcggggcagcggcggcgcggcggagccatccgcgctcgtgcccgcgcgggtgcgttgcygtcctggccgcgcccctgtcccgccgcctcccgctcctcgcctggcggatgtaggttgttggcctgaggggagctacgtagccgaggtttgcgctgccgccgccaggcccggtccggttccagcctctgcccggacgctagccggcctggccatggctgaccgcgggtgcccgctggaggcggcgccgctgcctgccgaggtgcgggagagcctggctgagctggagctggagctgtcggaaggtgagccggaccccgccctcaacccccgcgacccgccctcagcccggtcccccgcgcagcccctcactccgggacccccgcgcggcccctcactccaggacccccgcccttcacccccgggacccccacgcggcctcgcccctgggacctctgcccctcaacgggaccccggttcctctaccctggaacccgcccctcgccccggagacaccgttcctcaaccctaggaccccgcccctcatgtgggaccccagcacgacccctcgccccgagaccccggccccttacccccgggaactcccgcccctcacccccgggacctcctgcccctcacccccggaaccccgcgcggcccctcaccccggggaccccgcccttcaccctgggagccccgcgctgcccctccggactcccgaccctcagccccgggacacccgcgcggcccctcaaaccagggaccactgccccgcctctcatacaaggacccctcccccatacaaggactcctccccccaggcccttcacacctgggacccttactcctcaccccgggacgcctgccaaacttctggagacctttccctatccccagctgctcccccaatgggatccgaccccaaggactggctttgactaggtcgtttggacaggtgtgagaatcttgagaggaatgaccacttttgccccaagctgtgagccccgcttttctcaaggctgtaggtctgggcttggtctgggcttcaccaggatgactgcgcccgttgtccgcaggcagctacttcccttggagctgggagcccttgccgcgcgcctcatactctaggagctgcaccctgtgcctcattttattatctataaagtggggttataccagcactttccattttggattgttatgaggctaaaataccttaatatatgcaaagcacataacacttaggagttgttagccccctcatggaattttttaaagtaaaaaaaaaaagtcgtataaatggttggttgataaaaatagactggagtaatctggcttcagaggtggtgggtggcatttcccatttggatgttatccctttcaaggcctgtgtcctgatattccttttggctgtctttgggaaagagttaagttcttctccagtgtcagaaaggacttgcagtccttgaagaaaagcatgtaattgattcttactctgtttttgagatctaaatgcattttcagcttttagaatccattttttaaataatcttattatccttaatttaagtttcagattgataagattttgctgggtctggggtagttatttctcaaaacatctaaataatatgcactagcatacagtaagtcatttaatccttgccaaccttagggaggtagatgctgttgtgatcttgttttacatataatacaacatgtacttgcaactattttgaattcagcattcagatttttaacaatgttgtgacatgtggcacattttttttttttgagacggagtcttgctctgttgcccaggctggagtgcaatggcgtgatctcggctcactgcaacctctgcctcccaggtagaaatgattcttctgcctcagcctcccgagtagctgggattacaggggcttgccaccacgcccagctaattttcgtatttttagtagaggcaaggtatcaccatgttgaccaggctggtctcaaactcctgacctcaggtggtccgcctgcctcggcctcccaaagtgctgggattacaggcatgagccaccgtgcctggcttgtggcacatttttaaaaatggaagtacaggctgagtacacagtggctcatgcttgtaatcccaacactttgggaggccacgttggcttggagacgggagttcagaacagcttgggtaacatagcaagactctgtctctacagtattaaaaaaaattagctgggcatggtggtgtgcacctgtagtcccagctacttgggaggctgaggcaggaggatcacctgagcactggagcactccagcctgggcaacagagcgagaacctgtctcttctcmccaaaaaaaaaaaaaaaaaaaaaaggaaagaaatggatggatttgagaattcttggtgattagatgctcctaggcagtctgacaaacttaaattaggaatgggtttgacaggatctactgtactgcrtttgttaaggctctttagggaaaatcacatatacgcagtttagattctgtgcatttcaaacatatttttgcgtattgctcctaatttctgctccaatgtattcattattccctcaattttttgtgttgtagttgtgtttgagtgcttgctaggcattgacaattgaatcctttcctcaaagaactttataatttgtgcgacagaacacaagtacttaaatgaaagaaatgtttcctatctgttggatccatttatgctattgtcatcttagagatatgtaggggatgtataggtaagtaaaggtataagattatgtaacatggagrggaacctcgaaaaatagcttaagctgagaaagggggtaaacaaaaaaagtattgagcccagaaatggtggcttaggcctgttatgtttgcattttgggaggcccaggcaggaggatcacttgagcccaggagtttgagaccagcctaggcaacatagggagaccctgcctcttccaaaaaaaaaaaaaaattggctgggcatggtggtgtgtgcctgtagtcccagctacttgaggggccgaggtgggaggatcacctgacgaggttgtgagcctttatagtgtcactgcattccagcctgggagacagagtgggaccttgtctcaaaaaaaagtgttaaagggaagacagcagagaacagagtagtagagtggcagccaaggaggtggaagctctggcttcttggcttctttccctgctcctagactggcctgacacttttcttttggccaaaataggtcagtgattacttaggcacagtcacacgtggacctgcttccagggcgcttccacaggttaatgctggcttatgtagtttatgtggtggttgttgttgacgtgggctctccctgttggatttggagatgcttactggtaaggactttgttttaggcagatttttggcttcttcacacagtggtgggcatctggtaaagtgtctgtgaatctcctgtggattacaatgtctctaaacgtgggtttagttagctgtaaaagggggtgaataccagctttattgacattccaggtttattgtcaagattcagtcacatagtgtgtgtgaaaatgcttcgaaactggtaaggtgttttatttatataattaaagggagatattagtaatgagttatagtcctaaaacaaccaacattagtgtttcattgttataatttttatatattgtcaaaatagtgtaacttttttatagcattcacatttatctaagtgagaaattgcctaaaacttaagagttgtcactgtgcttggtaggttggaagaagaagcttaacagtgacaaagatgctgtcttcaacagaaactggtaatgagtgatacctgaataatctagaaaatcctgcatgccttcccctcagcctgttgaaagtatcctctgcctttcttcatacctcacacctggccttattctccagcatcctcactgcattctcatcatcaaccatagtgattggcgttggccctgagggaaggttctggtagaatgctatgatttatttccatagggcaagtttgctgaatttctgttatagattcccaagagggaaataaggcatagctgtgttcttgctccttaacttttctggctgttttgccctcttgacttaggagtctgcttcagattaagatgaagatgaagagtagaagtacatggaaccccactcttcttagaccccctgccccccaatcatgaacacatacagaagaattcatatgtgtggttcctgaaaacctatcaggatgttcattgatggaagtgagatcattagaggtataaccttgatatttaaaaaagaattaattcccaaacctttgtgctttgcctgttgctgtaacaaattaccttggacacacctcacagctgattttggcacaccagtgctgtacgtgtcttggagctattgctgctgaactgctttaaaaacatggacagtggtattttgttctttgttttaatagactacagtgggttagagaggaaattcctacacaataggctacctttatcccattccaattactttattctggttaataggtctattccatagctttaactttagtctttttcttgatttcttatattctaacaatgcaggacttctagtctagatggaataaaatgaaaagggggaaaaaactctgggtatacaggaagagacttctctcacaaagcttttttcctctttaactgtctttaatttctaaaatctgggatatatttgtgtgtgtgtgtgtgtgtgtgtgtgtgtgtgtgtgtgtatattttgagacggagtctcactctgttgcccagtctggagttcagtggcgcgatctcggctcactgcagcctccacctcccgggttcaagcarttgtcctgtcttagcctcctgagtagctgggattacaggcacacgccatcacgcctggctagttttttgtatctttagtagagacaggatttcaccatattggccaggctggtcttgaactcctgacctcgtgatccacctgcctcggcctcccaaagtgctgggattacaggcatgagccatcgcgcctggcccataattcttaattttcaaaatgacagcctgtcattgcctttgtgttaataaacatttgttgtgcttcttgaatattttgtggtatataaaagttctcatgttcagccaggcgcagtggctcacacctgtaatcccagcactttgggaggctgaggcgggtggatcacctgaggttaggagttccagaccagcctgaccaacatggtgaaaccccatctctactaaatacaaaaaattagccgggcgtggtggcgtatgcctgtaatcccagctacttgggaggctgaggcaggagaaccacttgaacctgggaggcagaggttgcagtgagccgagattgcaccattgcactccagcctgggcaacaagagcgaaacttcgtctcaaaaaaagaaaaacgttctcatgttcagattctactcatctgtcaaaggccaccccaaatgctctctatcttagtctattttgtgttgtgtttgtgttctataacagaacaccacatataggtaatttacaaagaaaaatttatttctcacagttccagaggatggaagtccaatattaaggtactagcatctagcaaggactttcttggcctgtcatcccatggtggaaggtgagaaggcaagagaatgtgtggacgagagaggaagggggccaaaatcatccttttgtctggaacgcattcctgataactaacctgtccctgcgataacagcattaatccactgatcatctcttaaaggttctgccgctcaacactgctgcattgggcactgagtttcttcctttttcttaatattcatgtctttttttttttttttttttttttttttcaagaaaacacacaacaaatgtcagaatatgagatagggaagttctcctggaacagcatgtagattattttctagagcactttagttaaatggtacttaatgatgataattcttctgaacacaattcagaatttgaaccaatatttgttgtttcaggaaagcagaatttcctttgaatgatggataagaatggtgaggatctttataatatagaataaattgctgaaaagaaactttgagggaatattcaaagcaccctcttattttgaaccttccttgatcatctctaatgtgactgctttctcaraacttccatatcatttgtcccctcttttggagttcttgctgctttttgtttttgtatttgttttcacttattcartaattattcagtgtccactgcatcctaggtaatatttcagctgtcaaaagtcagattttggctgggcatggtggctcactcctgtaatcccaacactttgggaggccgaggtggttggatcacctgaggtctggagttcgagaccagcctgaccaacatgacaaaaccccgttgctactaaatataacaaaaaaaaaattagctggtcatggtggcacgtgcctgtaatcccagctacgtgggaggctgaggcaggagaatcgctcaaacccaggaggcagagggagactatttttataatgatactaagatgccatttctgttttcactgtgttgacacttgtactgatggtccaaaagcagtaatagggaaaactgctgggcactttaacgtaaattgaggcagggactccaagtgtcactgatagtcattatattattcgctacctctccacttgcagttttaaaaaaacaaaaagggctgctttcacttaaacagaccctgatgaagcagtaaaaattaaaaaaaaaaattggccttttgtcttttcatgaggaaatgggaagtacatgaattgcttttgctgcacaaagaggtacagtgcctgttttgagaaacagcaattgtgtagtttgagttgcaaagcgaactagctgcttttattgtgaaatgccatttttgcttgaaaaagtgggtagcagacaatctgcagttattgagacttgggtatttggtggacgttttctggaaaataaatgagaggaaataactgacaatttatgaccaatgataatatttgtgctttcaagcaaaaatcaaaattttgaaaaaatttatctgctacagtgagcttgacagtttctcaatagttaacgacttctttgatgagattggtgacaatataatgaatgagtatttgatattrtataattaaatgtgtcagcatttggaagatccacataattttgtgaactaatattttccagctcaccattgcaccacgttacaaagtcatagtgcatgggtaaaagattcattcaaaagatagaccaatggattttaatgtagtgatatgaaaagttcactgataagagttatagattctacattataacttttttttttttttttttttttttgagatggagtcttgctctgtctcccaggctggagtgcagtggcgcgatctcagctcactgcaacctctgcctcccaggttgaagtgattctcctacctcagcctcctgagtagctgggattacaggtgcctgccaccatgcctggctaatttttgtatttttagtagagattgggtttcacgtgttggtcaggctggtctcgaactcctgacctcgtgatccgcccgcattgatctcctaaagtgctgggattacaggcctgagccaccactcccggccacaactttttttttttaagagactcccccttgcctggttttggtgttgtatcaaggaagaatgtccacagtgatctgaaaaggctgctgagacaccccacctttttccaactgcatgtctctctgaaaaaggatttgattcatagacttcaaccaaaaaaaccacacagtacaacagattggatacaggagcaggtatgagaatccatattgtcttctctgaagccagagttaaagcaacttgcaaaaatgtaaaagaatacctcttcttactaaatgtttttgttttcagaaatcttttatttttagtaaaaaatattatttaccttaatatctagtcagtttattattaaaaattttaaatgagttaggccgggcgcggtggctcacgcctgtaatcccagcactttgggaagtcgaggcgggcggatcacgaggtcaggaggtcgagaccatcctggctaacacagcgaaatcctgtctctactaaaaatacaaaaaatcagccgggcgtggtggtgggtgcctgtagtcccagctgctcgggaggctgaggcaggagaatggcgtgaacctgggaggcggaggttgcagtgagccgatatcgcaccgctgcactccagcctgggctacagagcgagactccgtctcaaaaaaaaaaaaaaaaaaatttaaatgagttaaatatttaaaaaatttcacagtattagttttgtttgtttgtttgtttgtttgttttttaagatagtgtctcgctctgttgcccagttgggagtgcagtggtgtgaggatagctcactgctgcctttaactcctgggttcaaatgatcttcttgcctcagtctcttgaataactagaacatagtagctgaaagacatggatgtcatcatctatttctttatattttttgtaacattttaaagctattgcctagtttaataattatttcagtttgtgtatgtaaggacaatcaggcatttaaatttataaaacatgtttgaaaatctttaaaagttacacttactgactagttgcttgtctgttgcactaacaaaatttattattcatgwttcgggaataccctctttaggttttgtttgttttttttttcatagtaaattatcccagtacaagtgtctttgtacaaaattttgatttctaagtttctttaaaaatatcaatgccagctgggcccagtggctcacacctataatcccagcactttgggaggtygaagaggatggctgaggaggktggatcgtttgaactcaggagtttgggatcagcctgagtgacatggtgaaaccccatctctgctaaaaaatatgaaaattagggctgggtgcagtggctcatgcctgtaatcccagcagtttgggaggccgaggtagacggatcacttgaggccaggagtttgagaccagcctgggcaacatggtgaaactccgcctctactaaataaaaaaaaaaattagcctggcatgggggcaagtacctataatcccagctactcgggagactgaggcaggagaatctcttgaacccaggagccggaggctgcagtgagctgagattgtgccactgcactccagcctgggtgacagtgagactgtctcaaaaaaaaaaaaaaaaaaaagctgggtgtggtggtgcacgcctataatcccagctactctgatggctgaggcagggagaaccgcttgaacctgggaggtggaggctgcagtgacctgaaattgcaccactgcactccatgataccctgtctaaaaaaaaaaaaaaaagagagaaaatcggcgccagaacaaatcctacacaagcccacttgtgtcagaaatttaaaatagtcagactcatagaagcagagagtagaatggtggttgccagagactggggtggtgggagaatctggaaggtgttgatcaaagggtatatagtttcagttatacrggatgagtaactgctagagagctgctgtacagcatagtgcatatagttaacaatactgtattgtatatttaaaaatttgttaagagagtagagctcatgttaaatgttcttatcacaaacaggaaaggaagaaacttttagagatgatgtttatgtttatgtttatggtgatggtttcacagggatatacttacctttaaattcatcaaaatttatatattaaatatgcacgagttcttataggttaatcatgtcratttaaaaaaagaaatatcagtgatttcaattttaatatcctaaaactttaaacatgcttcattgccagctattctgtacttgtttaattcctgtctttctttcaccgcttaagtttaaacttcactttctgttggaggctctgccttctactaaagcccccttctccccaaccttcacagaataaagtgcctgtgctctgtatccttttaaaactcattgtatcactcttgtaggatcataattatttgtttcatgattatttgtttgcttgtcttttctataccattttacagggagcatttcaagaggaaggtttgatctgctcatctttctgtctccagcaccttgcacattttaggcattttaatggatgcttattgagttaataaaagtgaaaacttcacatggtgtttattcagtttcaaataaagaatcctctgtaaatggattcaaacttagcttttttacagcagtttttctaattcagtgaacccatcagcaggatggatctgtgcctcagggagctgttgaatcagagtgtggcctttgttgctttaagtgaccagaaagaaaaaacttaagaggagactgagataagtgcactgttgctcctgtcctcctgtaggatccaggctaagctggagaggcctcactggtgtggagctcgatgacgtacatctaatctaatagtttgtttggggcccatgagggcataatccactgatggcctcatcgccatgctgtgggtccacactaccctcaagctgaggctatgcttcctatagcaggaataccaaggctctttcccaggagtcctgatgagaactttgtctcaaggactcctcattggcctggccggaactttcttagtgctgcctttagtctaagactttttctgtcccacctgccttcctttcctcttcccctggcaaacatctactggttccctccccattttccctcaagggcattttcccacataaatctccctttcacgtagtgtgtcctcagtgagcattagccacgtgtgactgcttctcttatcatcagggcaggtcaggggccaggatacctgttccatcttttgaaaaaaaagatagaattcaagagctgcagttttgtttttcaaatcacatatttaatcttttaatgtattattttggctgatgtgatatacatttatttagtataaaaatgaattcaggccaggtgcggtggctcacgcctgtaattccagctctttgggaggccaaggcaggcggatcacctgaggtcaggagttcaagaccagcctggccaacagagagaaacccccatctctactaaaaatacaaaaaatgggctgggcacagtagctcatgcctgtaaccccagtacttagggaggccaaggcgggcggatcacctggggttgggagttcgagaccagcctgaccaacgtggagaaaccccgtctctactaaaaatacaatattagccaggcgtggtggcacatgcctgtaatcccagctactcggaacgctgaggcgggagaatcacttgaacccaggaggcggaggttgcggtgagccgagatcgtgccattgcactccagtctgggcaacaagagcgaagctccgtctcaaaaaaaaaaagggggggccaggcacggtagctcacgcctgtaattccagcactttgggaggccgaggtgggcggatcacgaagtcaggagttgaagaccagcctgaccaatatggtgaaaccgtgtttctactaaaaacaaaaaaattaggtgggtgtggtggcgcatgcctgtaatcccagctactcaggaggctgagtcaggagaattgcttgaacctgggaaatggagtgagcagagatcacaccattgcactccagcctggacgacagagtgagactctgtctcaaaaaaaaaaaaaaaattagccaggcatggtggtgggcacctgtattcccagctactcaggaggctgaggcaggagaatcgcttgaacccaggaggcggaggttgcagtgagccaagataataccactgcactccagcctgggaaacgagtgaaattctgtttcagaaaaaaaaaaaaaaaaaagaattcatattatttggtcactcttctatgttataactgaagaaaggaaggaaatgaattagggttaagttaatgggaaaactttattctgccagtacatattttgtttatttaatctcgctctgttgcccaggctggagtgcagtagcactatcatagctcattacagcctcaaactcctgggctaagctatcctccgctttagcctcccaagtagttaggatttcaggtgcactctaccgtgcctacttttaaagtttttttttagattcagagtctcaccacgttgcccaggctagtcttgaactcctggtttcaagcgatcttcctgccttggcctcccaaagtcctgggtttacaggcatgagccactgtgcctggccttatttgtttttgttttttaagagcagtcttaggttcacagcaaaattgagagaaaggtacggaactatcccatattcccccacccttatacgtgtacagcctcccgcattatcagcatcccagtaaatcttttaaaactaatttttgctgtgcagtgagcttgcttctgggtagaattaacataatccttgtggctcaatctttacacctttaaattagctgacattttcagtattgcactggtctrttaaaaagactaggaagttatacactgcttagcmaagaaaactatygtcagtgaagacacaacrcttaaaaatagctgttacttctattgtgtattratagattatcacttagactaatgtacccaagggtctcccttcccttttcacacaggaaatgcatggcctctgttcttaggatttcctgggttcttgaaggcagcagctaaaattatagctgggagacagtgatcatgcgggggtttcctttcagactttgaattaatcagctataaggaaagaatagaaatcctgtgtcttctttctacactgaactgttcataatttaagagtaccattttggaaatagcagacaaagagcttttacactctttcagattttagaactttttctgcagtatctttagtaaagaacctttaaattaagtctctgaaacaaaaggacacaattgttggtatgctgaagccctaaccccaatggattatatttgaagactggaccttaaggagatatttaagatcaaatgaggtcaagggggtgggccctcatccaataggactggtgtccttataagaagaggaggagacaccagggatatttgtgcatagaaaggccatgtgaagacataggcagctgtctgcaagccaaggagagaggcttcaccagaaatgaaccctctggcaccttgatcttgagctttcagtctccagaactgtgagaaaataaatgtctgttgtttaagtcgcccactctggtattctgttacggcagcctgaacagacggacactcagtgtgtcatcctgttgtttaacaacattcaacagactgagtgccaggaggcttacagtctakcaggggctgaaagacatgtaaacagtggcaatatcatgaaatgtgtacagaacccagtcagcccaaggggagggatcatcagcactgcgcaagctgggccaatagaggaagtacagtttccttgagctttgttttgaaagcatgtgtgaagagggtggagaaggaggagcggggatggacatgaagacaaagggaggtgaaccgaagttgagtgggccaaggaattccaggcagtgttccacaggtagaggaggaaaggcaggggctaacttacagcagggctcacacatcctagtaaggaatttggacttgattctctggagtctagacaagctggttgaaacaaactcaaattcctccctgtagctggttgggtgttgtggatgtgtgaggtgaccaagagtaaggcaggaggggtgctggtacctgttgcctctagaatggcactgtttagaactttctkctacgatgggaaagttctgtggtgtccagcatggtggccaccagccacatgtggctactgaacacttgaaatgtgggtagtgggacgagggaactgattgttcaatttaatttacttttaattaattaaaatttaaccatgcatggctaatggctgctgtactggacaacagcaaagtgtatgctctgcatgaaggcttcctattaacaagaaataccatgaaaatacattttattcctaccactgctctcgacaaaggagagaaaatgagcaagatgaaaatatgtgtacacattcaagaactcagtgaatcttgtaaacagatgtcaatttcctatttttaattaaaggctatggggcaggagtttgagactaccctgggcaacatagggagaccctgtctctacaaagaaaaaaaaattagcaaggtgtgttggtgcatgcctgtaatcccaactatttgataggccgatgtgggaggattgcttgagattgaggctgcagtgaaccgtgattatgccactgcactccagcctgggtgccacagtgagaccatgtctcagggaaaaaaaaaggggggggggccatggcggtggtttttcttgggtgctttatttattttttattttattttattttggagacagagtcttgctctgttacccaggctggagtgcagtggcgcaatcccagctcactgcaacctccgcctcctgggttcaagaaattctcctgcctcagcctcccaaatagttgggawtacaggcgtgtgccaccacgcccggctaatttttgtatttttagtaaagatggggtttcaccatgttggccaggctggtctcgaactcccgacttcaagtgatccacccacttcggcctcccaaagtgctggaattataggcgtgaaccactgcgcctggccaggtgctttactttaaacaggtcttctttaataaatgatggagccagcagtacccccacacagccccacctttttaaaaaatgtattaacaaaacatttctgcataatctcttttgtctctttctgtctccctctttgatttagaaagattgttctgcagtatgtgaaaagtagattggaggagtctgaaattgggggacagaaaagttagcttgaaaaacccattgcagtaatccagggcaagagattttgctggtctggacagagctgagccaataggatggagagsgcaatcagaagtagagccagcaggcttctgtgtgaagtgcacagtaaaggagggtctagggtgactctggagtttctgaaacacctgtctgggagatgatggtgctgctcacgaagacgtggaacacaaaaggagtgtgaggctgctctaggagatctgagtggtgggacccagagtgcatttggatatatgagtctagtactttctagaaagggctaggctagtaatttggaagtcatcagcacatagatagtaattggagtgaatatgattaccccataaggagaaatgaataatgcaaagagagcctaggaaaaaactctgaggaacccaaatccatacgggaaaggcagagaagggagagactgcagggaagactgaggaaggagacagaacatgtgtgggcatctgtgcagctgaggcagggaaatgtgtgtggaggattttctgggtcagtattcatgaccaatcatcaggcaaagatgactgtacttcctcaaatctcattgaaatggttgaagaggtttttttgttttttggtttttgttttcctaaagaggtgagatctcactgtgttgcctaggctggtcttgaactcttgggcttgggctcaagtgatcatttagcctcagcctcccaagtagctggaactatagctgcgcacccccacatcctgctaggttttcagaattgaaaaggaattcatagtctaggttctgggaaattggaacggtggatcagagcagtgaggattatctgattagggaagatagggatggagcaggtctgcagcagatgtacagtgcatcctctgaacaaagttgtggaggaggatgggaggtggtaatgaggaaaggatatggttttcatcggttttccagagtctgctgatgtattcctgtagaaggtaccaccagttgtttggggaagtgggcactcagcagccctatgtctgcctcaaccagagactcttctccacttaacactcttcctaactgttcagttgaacagaagatgtgcagctgaaaggttggaaaaacattgaagtggataatatctaagttctcctttcagttgcraggctagtctaagttttctaatcatgaatgtttagtaagaattatttcaccatgtggctttagctcaccaagtgatatttaaaarcattcttccattaaatacctgctattttaaaaggtttattacctatttatacacaaacttgttagccaagagctatatttttatggaagagtcttgttacctttcactgacattgttatctacctrtatgtcctgaatgcatgttcagggtcttaacttctgttagaaggaataatttaaacaagctcatgagtactgtagaaaatatggcagacattcatattgagcaagtactytctggtccttggaaagtgcagtatagtcagccacaggcttcagtttgaaagtcttttaagagttagaaacttctgaatatggaagactgcttcttgtttgatttttctctaattgtgaaatatttcaaacataccaaaaacttgtgtgagtcatgatatatgtacccacgtacctaccacccartttttaaaaaatgaagatttggacacattagattcatatttgaaccattatagagagagatgactcccattcactctctgattccatttgtcatcttcccaacttctctcctgaatttggtattttatcatttaattgcatttccatatatcctgaaacaatcgatagtgtttttgcatattttaaaactatgtaaatcatctttataaatccttctgaaacttgctttttacctcaatattatgttttaaaaattatgatgattggctgggcgcagtggctcacgcctgtaatcccagcacttcgggaggccaaggcgggtggatcacgaggtcaggagattgagaccatcctggctaacatggtgaaaccccatctctactaaaaatacaaaaaaaaaaaaaaaaattagccaggcatggtggtgggcacctgtagtcccagctactcgggaggctgaggcagaatggtgtgaacccgggaggcggagcttgcagtgagctgagatcacaccactgcactccagcctaggggactgatcaagactccgtctcaaaaaaaaaaaaaattatgatgattatgttaatacatgtagctctggctcaatctractaactgccgtgtggtattatcttatatggttataccatgttgtggtagtttttttctcccaagtgtatttttgaaacaaatagaggatgagcaatctacagagttggcatcagcatgactccacagtcctcttggagaagagtgcccgaggaaggcgcagggcactagcccagaagcacagatagagactagcatggggaagagctcaggaaaaggagggaaatggagagagccatcagacagggtagtaagtgtaggagtcaatgtgtgctcaatatagaggaagcagatctagggtgttcaaggcagatttgggatgaatctcamgtcttctagtcatagcatcactctattttttttttttttttttggagacagagtctcactctattgcccaggctggagtggtggagtggtacaatcttggctcactgcaacctccacgtcctgggttcaagtgattctccagtctcagcctccccagtagcgagattacaggtgtgtgccaccatgccaggttaatttctgtattttttattagagatggggtttcaccatgttggccaccatggtctcaaactcctgacctcaaatgatctgcctgccttggccttccaaagtgctgagattacaggcgtgagccactgcagccagctcgtagcatcgctcttaatctggaagttgacgtacccctgctaggccgtggatatgtaaaaaggatcatttaatttctctgtgcatctgtcttcaagttttacactggtcaggtatggatcactcctcgttttcttgcctcctcctgctcttcctctgtgtgggcacctccagtaggaccggtccgattgtttgggtaaatctagcaacattgacttaagcttactcctcccatggtaagtcaaggaagcacgtgccctttttcctaatagaatatcaaaactaaagatttataygtatatatttttatccaggcgtggtggctcacgtctgtaatcccagcactttgggaggctgaggcaggcagatcaagaccagcctggtcaacatggtgaaaccttgtctctactaaaaatacaaaaattaacggggcgtggtggcaggcgcctgtaatcccagctacttgggaggctgagacaggagaattgcttgaacccaggagggtcaggttgcagtgagctgagattgcgccactgcactccagcctgggtgacagggtgagactccgcctaaaataaaaaaaaagatttgtgtgtgtgtgtgtgtgtgtgtgtatttctttttttttttttttcttgagtcagagtcttgtcctgtcgcccaggctggagtacagtgccactatctcggctcactgcaacctccgcctccctggttcaagtgattctcctgcctcagcctcctgagtagctgggattacaggaacgcaccatcacacccagctaatttttttgttttgttttttttttggtagaggcagggttttgccatgttggccaggctggtcacgaattcctgacctcaggtgatccacctgccttggcctcccaaagtgttgggatacaggcgtgagccaccacgcccggccatctttcacatttagatgcgtaattcacctggaatttaatttcatgcgtggtgtgagggaagagtgatttcatttctattgcagttgggtaatcagttgactcagaacatttggaagaggctatccttcccctgctgcttcggactgatttctgctgtgttgttctacttgyttatcttagcacctgctccattctgtcttcatatctggtaaagtctgcccttttaattttattttgtttttcaagcttgatttagctaatcttggccctttgtatttccctatatactttggaatcagcttgtcaatttctatgcaagaaactttcaagaattttttttttttttgagagggagtttcgctcttgttgcccaggctggagtgcaatggcgcgatcccggctcacagcaacctccgcctcctgggttcaagccattctcctgcctcagcctcccgagtagctgggattacaggcatgtgccaccatgcttggctaattttgtatttttagtagagatagggtttctccatgttggtcaggctggtctcgaactcyggacctcaggtgatctgcctgcctcggcctcccaaagtgctgggattacaggcgtgagccaccacgcctggcaaaactttcaagaattactcaggctgactcttgtgatccacttggagagaaattacacttcacagtattgagtcttcagattcatgaatgtggtatatcctttcatttctttaggtctttaatttatctcagtaatgtttttataatgttgttagtttctgggtagtggtcttgcacacctttcattaaatttattcctggatttgagatacagtatttttcagtcctagaatttatgtttttttttttaaattcacaatcctgctttttaattccctaaacatattgattatggttattctaaagttccattttctatagctttctattattgtttctcatggattttagtcatagtttcttgctgccatatgtgcctaattacttctgatcaaatgccagacattgtctatatagtgatcatttgtgaccacaaagggcttacttttgcatctggtaggtagataggttgggaatagatgcagtccaagatcactttaatctatatagagagaaagtgatttgaaactggctccagtccttatgagtgctgctctatttttagttcatacccaaggtgtggtccttctgagtcccaacaaacaacctgggatgctttccagggcacctcgtccgtgatgagctcctgcctctctgagtctgtccaagttccactcagttcagctacttggtgattactttttgacttcacttggccctcagttcttcacttctgtaatgtcttcagatttaaagaaaaactttaatgtgatctttttagttgttcccattggaagagttggtctgagtgctataattttgtcagtgccataaatggagttcctatgtgtgtgtatgtattcagtttaatgaacatatttttcatattttattaaaaactgagataaaatatttactacacatttaaaaagcccgcttttaattacaaatgaatgagacagtggacattcaaacactgctgtggaagcatatctatactcttcagcgttaagcataataatttgcttatttttttttaaggtctcattctgctattcaagctggagtgcagtggtgcgatcatagctcaccgcagcctcgaactcctgggctcaagcaatcttctcacctcagcctccctagtagcttaggactataggcatgtgccaccacagccagctaattggttttttttctttttttgtagagacagggtctctttatgttgcccaaggtggcttctaactcttgggctcaagcagtcctcccaccttggcctcccaaagtgctgggattacagatgtgagccaccatgcttggctgcataaataatttaaattgcagtcagataggctctacttttgtgtattagatctgtatatttaagacccctgtgtttggaaactttaaggcttggaaagtgaaatctctacgtgcttatattaagaacgactgttaccagtgaatggtgccaccgtgcaaaatattactcttcacagattttcctcaccttttgttctgtgtcacgagcttggagactgcctgtatttttttttttttttktgtggcatctgttttcaagttttattatggtcaggtattgtattagtctgttctcatgctgctaacaaacacgtaaccgagacttggtaatttataaaggaaagaggtttaatggacacacagttccacatggctggggaggcctcacaatcatggcagaagatgaagaaagcaaagggacgtcctacgtggtggcaggcaagagggygtgtgcaggggaactgtccttttataaaaccatcagatcttgtgagacttactatccggagaacagcatggggaaaaacctgccsccgtgattcagttacctcccactgggtccctcccatgacacgtggggattattacaattcaaagtgagatttgagtggggaggacacagagccagaccatatcaggtgtggatcatccctcattttattgtttcctcctgctctgtgtcggcacctccagtaggacctgtctagtcgtggcagctgtgggctttcccagctgccatggcacagagaccttgccttgggatcctgggtaagcttgtgtggcccaagttgggacctagtggactctttggacccgttctttggcagcaagggaaaggccaatacctttccaaaggaataaacactggcagctgtgtccagctcacttgggtccaaggtctctggtgtgtatctgatttctggctggtgcccaccttggaggcggtaaaagtgacctgaccaaaggcagactgtactgtactggattggaacctgccgggcccttggggctcccagccattgtgtcatgccctgttggggtgcttcttccttagccacacttggtccattgtggagtcacccagctgctaactgcctgaagtacttctttgtcagacactcctttcagactccggaaagctgatttgcttgagcccagaagttggaggctgcagtaagctatgccactgcactccagcctaggtggcagagcgagaccctgactctaaaacataataaaagaccaaacaagaaaaagaacagcaccatcatccccaaacactcctcatattatccctttgcagtctcccggtcccccagctgatctattccctatccttatgggtttatcttttcmgaaatgtcatataaatggaatcatatagcatgtaacctttcgagaatggctttcttctttcagcgtaatgtattttgaaatttattcacacttttgcaagtatcaatagtctgttcctctttattgctgagtagttttccatagtatggttacgtcacagtctcttcattcacttgacatctgggttgtttctagttttttggtgattaagaataaagtggctataaacaattgtgtacaggtttttatgtgaacacaagtttttacttctctagggtagataatcaagtggaattgctgggtcgtctggtgagtgtttgctttactgtataaagaacttccacactgttttccagagtggctataccattttgcatgcccatcagcaatatatgagtttctattgcttcacagtctttgtcagcacttgacattgtcagtatttttaaagctttagctgtttgaataggcatatagtggtatctcattatggttttgtgtttcctaacagaaggaaaatgataacagcggaaatcagtgaaactgaaagcagaaaaaacaataggaaaaaatcagtggggccaggtgcagtggctcacacctgtaatcccagcactttgggaggctgagacgggtggatcacttgaggtcaggagttctagaccagcctggctaacatggtgaaaccccatctctactaaaaatacaaaaattagccaggcgtggtggcgcatgcctgtaatcccagctattccagaggctgaggcaggagaatcacttgaacccaggaggcagaggttgcagtgagccagttgtgccactgcattccatcctgggtgacagagcaaaactccgtctcaaaaaaacaaaaacaaaaacaaaaaacagtagaaccaatacctggttctttgaaaagataataaatttgataaacctctaacaagaccgacagtgagaaaataccaaagacacaaattaccagtcaggaatgaaagaggccaatctctatagactgcacagacattaaagcatgrtaagggagtactatgaacaactgtatccatatctggtcatatgcccagtagatgtttcgggcaacgatkgaccacatatataacagtggctccatgagatcatgataaagctaaaaattcttaccacctagtgaccttgtagccattgtaacacaacacattactcacgtgtttgtggtgatgctggtgtaaacaaacctgctgtgctgccagtcttaaaaatctaatccatataattaggtactgtacataatacttggtaatgataaatgaatgttactggtttatgtatttactgtacaatttattgttattttagagtatattcctattatattttaaaaatgttaactgtcaaacagcctcaggcagacccttcgtgagctatttgagaaggctttgtcattataggaagtgtcaagcttccatgcatgttattacccttgtgcactactcatctttgttcctgtgacctgtaggggtagttgagtgcttttgagaatgggtttttagaaattgtgttgccgagtgaaggacttggtgatattactagggatttggcatctgtgatcctaagtgagattcttctgcagcagtggagttcagccagagccatattccgtacctctgtgatgcagattaattgcctctcctacacacatgcacatttgaaaattactgccttstaaaccttaaaaagttgtgcacaagttgaaatttaataagtgaaattgtacagttatatcctgaacctgatgaggattgtcactgcagcactgagcatgttggtgtgggtggtggctggctgtggacctgggagtgtgcagtgatggagtgagggggtgaacaaggatgaygtacttccaaggggtacccgggtcagtgcagtgaatcaggtgtgctcattgcattgaggaagggttggttttaaaaatggaaggcttagggaagaaaatagtgatttataatatratgccattcgggtcaattaaaavtacacagacacaaagcaacatgcattctgcagaatatattctaaaagacactataaaaaagtttctaaaagacactatagaaagaagctataagaaaatatgtctaaaagacactaaatgcaaaaaaaaaaaaagtctgaagagatggaacacagtggggacacagggaataaataaatggaaggacaggcagataagcatgagaggcttgggaggagccaagtgagctcttaaagcagaggctctgtgcagagggcagggcttgggcgcagtgcagggtggagtaggtggggaggttgtggtaggctggtgtggaccagagcagctgcttggcccacaggccgtggctcaggctcttcttctgtaggatggcatattaatgcctacccagaggcttccactgaggcttaacttagatgtcagatattcaacggtgtcagtctgttcacacaacaaatcctacaataaaaaatacatctaaaggaaatactcaattatgtactcaataaatgacatcagcctgtgtcttctgattcacagcagccttactgctttgcttgcttgttttgagagaagggagatcttacaaaacactaaaaactctaccatgttcacccagaggacaagctaatcatgagaattgtaatatgtatttctggtctaaataaagtcttcacatcacacatcccctgttagaacttccaggtrtgtgtaggaaaccaaatagtgtgcttacattaagaagtgttktcatgatggtgcatttcctacctcattcctaggtggtttaatttgttttcaggctgtttttccttatgataatttactggaacagccgtcctttttcctcctttcccaaggayaccccttggcctgggacggcttgtgtcccatgggtcccttattgcaatacttgtgaaacttgaacctgcacaggagttactggaggatcttgataaagtgcggatttggattctgtcagtttgggatatggccttagagtttgcatttttggcaagctcccaggggatggtgatcacaatttttaaaatttgaagtgttatttacacacagtaaaattcacccttactcttctacagtggtacagatttttgacaaacgcatatgctcatgtaaccaccactacactcccaacgtagaacagtttcaccaccctcaaaattctcttgtcttttcctcactcccagcccctggcaaccactakctgtatctgacgctatggttgtatcttttccagaatgtcataaaagttgagtattcagtagccttttgagtctggcttctttcactcagcagcatgcatgtgagatctatccaaattgctgtgtgtatcagtagtttgttccttttttattgctgagtggtattccattttatgggtccattatagtttatttgtccagacacttcatggaargacatcagtgtttccmgtttttcaatcataaattgatgtttaattttaaaattttggaattgtagaagaaatgcaattcttttttccattgttgttttaggtgacatcactcaaaaaggatatgaaaagaaaagggcaaagctgcttgcacgttatataccgcttattcaaggtaaggtcaatacactcaggtgttacatagcaattatattgtttcataacatgtgatttttaaattgtttttagagtttaacatttgttagcaatgttaaaccaactttaaacactggtatatgttgattattgattgagacagggtctcgctgtgttgcccaggctggtcttgaaaaatatgcctctaatattaaataataaaatccaaaggcatagattataatttaaagctctggcttgatacagatctcagatctcattcccaaagaggatttattttatttttatgattatgaacaacctggcacaattcttactagggctagagcatctattgtaaagatgtcggttcttcccacattagattgatttgtagattcagtgcattcatcatttcaataggttttgtgtgtgtgtgtgtgtgtgtaacttaacgagttagttctaaaatgtatatccaagtataaaaggtcaagagacccaaaatattttcaaaaaagaatgaggtgagaggattggcccaaccaggatatgaagagttattattaaagccgttgtcactaagacagactggacagctcagacaaatgcatatgtgtgcggactttgcacatgggaatggtggtgtggcaggcatggtgctggcatagttctttatccatatatgaaacacatgacattggagacaaaaatcggttccagatgtattaggcctaaatgtgaaaggtctttaaagcctttagaaaatcttacaggaagattgttgccatctcaagataggaaggattttttgatgtcactaaaggtaccaaaaagcaggaaccataaaggaaaggattgattaattggaccacattaaaattaagaactttttttcaaacgtcatcataaagagattgcaaagacaaactacagagtgtgagaagatagttgtaacacaaataagaagtagtatccagaggccaggcgcggtggctcacgcctgtaatcccagcactttgggaggctgaggtggggggatcatgaggtcaggagttcaagaccagcctggccaacatagggaagccttgtctctactaaaaatataaaaattcgccgggcatggtggtgcgtacctgtagttccagctgctcgggaggctgagacaggagaatcacttgaacctgggaggtggaggttgcagtgagccgagattgtgccactgcactccagcctgggcgacagagtgggacttcatctcaaaaaaaaaaaaaaaaaaaaagaactaaagaactagtatccagaatgtaccgagcagtgctgtccagtagaacttcttgcagtaacggacatgttctctgactgcattgtccagtatatgaaacaccagccatgtatgatgattgcacataagaggcaaggtcttactctgttgctcaggctggtgcacagtggtgtgatcatagctcactgcagtctcaaactcctgggtttgagcagtcctctcacttcagcctcctgagtacatgggattacaggtgtgcaccaccacgcccagcttactgattgagatggggtctcgctatgttgcccagactggtcttgaacttctgacctcaagcgagttttctgcctcagccttccaaagtgctgggattacaggtgtgagccaccacaccttcccttaatttaattagtttaaacttaatagccagaaagtctcccaacatgataagaaaagtctagtagagaaatggatgaagattcaaataggttatttcataagaggaaatccaaatagccaatgagcaaatgtaaagatgtttaacctcactagtaatcagagcaatgcacattgtaaccacagccatctgtcctgttggagaggattcaatcagtaggatgcaggcagctagtattacatagtaaagttgaagaggtgcagcagttcttcaggtacatatttgccctagagaaactcctatttgtttgcaccttattctcttgtacaaaaatgttcattatatctgtaaactgccaagaactcaaatacccatcaacagaattcatacagcggaaagctaaagacctacatgcatcagcaagaatgaatcttgtaaacatcgtgaggatgaaggaagcaattacaaaggcatatagccaatacaagcttaaaaaaagacgccaaaccgatctgttaatatttagagagctggtgtagtgagtccagaaagagaaggaaatggttttcacagaagccagcacaccatttcctcatggaagttaaattggagagggccacagggacccctaaggcactgagtgttttatttcataacctatgtggtggttacattgattgtttcttaataatattcttaaactgcatacatgctttgtattgcctatattggtatgatatattttataacagatcaacaacaacaagaagattgacgaggctctttatatgctgatatttattcacccaaaataaaaacaaactcagagtaaaattgggattgaaggaaactattaaaatatctctaaagcccatttgtccaaaatcaccagcaatcatcaaactaaacaaccagatactgtagccatttccattccaaatgggtaaacagaaatgctggccatgcccrttcttattacacattatttgggtggtcacagctgatgcagtgcgatggaaaacaaagcagaataaataaatattagagaacaaaagataatcatctttaaatataggtgatattattttatacctcaaaaactcatgtgactgctcatgtaactattagtaagtgattttggtttgatatgaagatagaaggcaaatatgcggcttttctctagcaatatttctgttttcaaatatgaaaaaatcttattcataatgaaaacaaactgtcaaatgcttattaatgcatttggtaagaaagacagaacctasgttaggatcgtaaaatctatttgaaagaaataaccaagaccctaatatatgaagaaacataccagtttcctaactggaaaaacttaatacatcctataaaactggcagatctcaagttagtgtgtgaacataatgtagtccagtctgaataccaggcctgaggttttcctaaacctaggattggaagtgacccattagaagaggcaaagttctgagagtagcccatcaatttttgaaaaagaacactggtgataaaggactggcatttgagttactaaacctgattgtatatgctttatagtcacaacaggaggatgccagtgtacagagtacacgacccagtcagtggaagaaaagaagtccagaagtgatttgagaggatatgaaggaggaagggttaatttaatagctggtactatccttctgcaggcaagaaccctcttcctcctccccaccattagtgaacataaacttcagaataattaaagttctaaatatgtttttaattataaaaacatacaattcaggagactatttgaacacccctttgagtaggaattgtcttcataggcaagataggagacctgggagctagaacagaaaagatggacaggtgcgataggctccctagaaatgagaacatttcagaatgactgagctgctactcgccaggccacagctctgtatgtgtacacagttcagggtgtccacagcagacaaggagtgaggcttcctggtcttttagtgagggtctktagttgggtaaagtagcagaaatccaaaggagaggaaatgtggatgggcaataaatattaaattatgttcaacctcagtggtagatatggaaatgcaaattaaagggcaccatttttctcttatcacattggcaaaattctagaactttttataacatctagtgctgacagagagtggagaaatggcacttttcatacattgcttgtaggagtgtgaattactgtaacctttttggaaagttatctcttcatatctgttaagttaaaaatatatctactccttcatccaataatttcacattgggttttgtatctatctttgttgaataaatgaatctatctcaaagaataaaaggatgcatattttggaatacaagtgtaaggaagtccgtctgtgtatatgtcactttacagcatgcttgtttatcatccataaggtgtaagactctgtattgtccgttgtgaactttaaagttgttttatccagtcacaaaaagccaaaagccagtagggattctgctcattatgtattttgtacatatatatacacacacagacacacacaaacacacgtgtgtgtgtgggtgtgtgtgtggatgtgtgtgtggatgtatatgtacatgtgtatgctcacattttgaagggctaatactgatttctgtagagagtgttcccattctccagtgctgtataactgaccaccccaaaatgtacacagtacttgaacaacatcagcagcatctgttctgctcataaatgtgcagtgtaggcccagctcaaatgttaccttgtccctgtccacagagccagagctgggtgctcaagtcctgggccaacatcctgtgagggctcctcagtcacagctgtggctgttggggtggggagactcctgctgccgagcacctggctccccacccctgcctgtgtctccctctgtcctcatgtggcccctccactggggggcttaacactctagacttggtgtgtggtgttgcacagagccaggtagagccgtgtcgcctttcacgactagccttggaagtcacacagcatcacttctgccacactgcgcttgttggggcagtcactgacctgcccaggtttgaggcagcgtggactctgcctcttcagggagtggtaagggctggaggagccagcgggactgcaattcctgctggccaattttatgaaacattttgaaacaaaggctaaagctaaatgcatatttttgttgaagcacagctgcaggttttgctttgtgctgtctgcaaatgtcagcaaattggsttcaaatgataccagggattttgttcagtgacttgaacaactgttccccattccttcgctcaccgtaatgtgtcttgagggcatctgtgaccaggggaccactgcccagagagtggaggtcctggtgagggagtgtggagagcagcagcgtgaccttgatctgccctgatttggaggcggagcaagtgggtggtgcggcgagggcagctggcccggcctgagcaggtcccagcctctcagcactttgggccctgacgccatctttctaatgcccctctcgctcttgttttctctgacttttcacttttttcctgtttgtatcagagggctactggtggaccccagtggtggtctggtgagctgtttctcactcagggtttaccgacactgtagaacaatgctggggacgaacagcacggaccatttcagacttggaaacgtaattcagargtgggctttgggagggctttctaccacggctcccacccctgatgtgagctgccatgtactgtgctgccaagggtacagggccagctgtttgatcatcacccttcatgcggatggtgaatgagaggcagggctgggtgatgtggggagaggagagcrcggaagtggatgttgcccttaacccacagcatttatgcgtctatcactgacttccagattaaaggctctttgatagagggtatgcaacagatgagaaatgtaagctgttttcaatggactttttcataattggaaaagcaaattgttcacataaggtattcccataaaattgtgtttcaggaatagacccrtctctgcaagcagagaatagaattcctgggccctcacaaaccacggccgctgcacccaagcagcagaagtctcggcccaccgcctcgagggatgagcgcttccggtcaggtagggtcacagcctaggcagtggggraggtggacrggcctggagcccttggactcttgccatgaagtcttccagttatttttcctttgccacaatatctgccaaagaaattattttcacataagcagtaatgtacatcatcatatttttttcaagaaaaacatttaaccttcacgtaaccacagtctgttttaatgtatggtgtagctttagtggcactttcttaggggatgcctacaaaactctctagagaagtcttcttctcactcttactagaataatttctttaaaacttttgtacactttttactttgaagttgatactaataatttttgtgctttatggagcagctttactgctaggtgcaggtgttttagtatttctttttctaattttggagatttccttccaattagatttctgccactctgtttggcagtgcttttatgaatatttaaatttgtctctgatgttttacttgaatcaatagaatggccattgaaaaaaattcacattttctattatagtttatatattaataacttgagcacgttatctatttaatattttcaccactgtgtggttgtatattttcttcacatttaagctcttttgacaggcctttttcagaaaaaattttaatagggataatggttgttttaagaatactgaaaacaaagattaagattttaaatgttttttcaacagggagtgtaaagaaatagtctaagaaatattcgaacagataatgtcttaccaatttgatacacatttataaaaaactttatcatgtggcaaacagcttcttctctgattgtataaataatatatgcttagtgttaaatatataaaaaatattataccaaatttaaggacaaagttaaaaatcacctgataccyctgaatcctgagatggccgccctcagcatttcactgagcactgttgtcctcatgcctggatgcagatgcacgcacacatgtgtactttccatgagagtggtcctagaaaaggtctcctcctttctgccgctccttattttctacatgtcccagctcttctccccaaccctgttccctgctcatggaagtgatgttaataaactggtttctgcccttgtgaagtttatactaggtgtattctttatcttttgaatacaggtcttttatcataaatatgatttgccaatattttctctcaggctgtgatttgtctttgtgtttctttaaagtatcttttgaagagcagaagtttttaatcctgatgaagtctaagttatcatttttttaaattgatagtgcttttgttcttgtgtttaagatatctttgcctaacccaagattacaaagattctctcttgtgttttcttgtacaagttttgtagttttaggttttttagtgccattttagtgcccttaagtttgtgatctttttttttagttaattttagtgtaagtacaaggtatgaatcaaaagtttacttttttgcatggaggtagtcagctgttcctgggccattccttaagcctatgctttctccagagaattccctttgcacttttttctaaaagcagttgcacataaatgcgcgcatctatttctggactctctgttctgttctattgatctattcgtctgtctttatggcaaaacagtgttctcttgatgatcataccttaataataagtgttaaaatcagtagtgttagtccttcaactttgtttcttatctgtgttctgttgtatctaatgtgtcttttttccttcttgcacctttaagatttttctctttatcactgttctgtgggctcgattatatcctctctgaaattcctatattgaagccctaaccccggtgggatgctatttggagtttggtcctttgggaggtaattaggtttagatgagatcatgagggtggggccctcacggtgggatcggtgcccttataagaagaggcattggccaggcgtggttgttcacgcctgtaatcccagcactttgggaggctgaagcaggcggagaccagcctggccaacatggcaaaaccccatctctactaaaaatacaaaaattagtcaggtgtgatgacacatgcccatagtcctaggtattctggagactgaggcatgagaatcgcttgaaccggtaggtggaggttgcagtgagccaatattgccccactgcactccagcctgagtgagactctgtctcaaaaaaaaaaggaagaaaaaaaaaagaggcactagagcttgctggcccccgccctgccccatcaacctatgagtacaatggttagaaggcagatgtctgtaagccaggaagagagccctcaccggacaccaaccatgaggcaccttgatcttggacatacagtctccagtaagaaaaatttgtgttgtttaagccacttagtttatgctgttttgttatggcaactgagcagactaagatgctggtgttgagtgatttgattatgatgcacgtgggctggttttgtttcttgtgcttggggtttgttgagtatttttggatctgttgatataccctatcaggttgatattatctatatttttagttctaggttgtttttaatctatacttattttcctttttttctaagacagcaataatgtttaggggaatcacagtaacttccaaatccatcacaagggtctcagtttgtttcttgctctcttttcgtgagtgcctttttccatgagtgttttcagttaagtccttgtgtggaaatgcttttcgaaccttgtatgtctgataatatttttattaaatattcatatttaaatgataatttggctggatataaaattctaggtttaacactttttgtcttcaaaactattgcttttttgtgcctggtgttactactgagtattgtcagtctgtttcttgatctttcaaggtgatttacctttttctctggaagcttttagaattgttctgtgtctttgatatccatgaatttcctttatcatatgtctaggtgtgaattcttcacctttcctgagtaggaaaaggtttaacctggccctacaagccatttaaatgtgagatttttaaatgttttcagacatttgttggggaaaattgaagcgtctacaaaactggccatcattgtattatagctcccctggacccatagtcgagctccagaaattcttggccatccatgccctgccttggattaatctatactctacctgcttcctcccttcccatatggtttcatagcaaatctcggatatgttatttcatttagatgtcataatattctcgatctctgtcattttgatgtcgtaatagtcttggtttctgtatctgaaaagattgtatttctaaaagataatgccattttcacaaagtaattaacaataaatacttccttaatagcaaatattcagccaatgttcatatggcttttgctcgtatggcttctaaggaacaagtttatttggacccaggattcaaataagagctacacattgcagttggttggtaagtgttttcagcctctatgaaccttagtttgtaggagaagctgagctgtgtttgtctgatggttcctcttggtgtctctgacatgctttttaggtcactaggtttgatgaaagtcaggttacaacgttcagctgtttacaagactgtcatgggtggccctgtgttcctccaccaagaggcctgttgggcctgactcttggctgttcactgtggtgcttgaaaaccagtgatttttctcagttcttagattgatttcctttgggctgcaaaatggtgaaatttagattctgacattccttcttcactcaaaggccagaatatttccgtaaagagaaacttctgttatttacaacttggtacaggaaagaaagtcaagatgaatatttaattctttccatttatttactagttttcagaacaataggttgagtcactggcctcctccaatggcaaccaattgattgcgtttcctcttttcctttttcttcttttcttctgtcagtatcatatttgatgtttcagtccattttagtatttattcttaccgatattcagattgtcccattcttcgccattgggaatctcttcaaattggctcgagttgtttgaccatttcctggttggctgttaggataagaagttctaggttcatcctgggcatttctcccctgctccagaatctgccatttctaagggttttttttaagtgaggatggtgtttcaagaccacagtctgggcactaggatgctgattgctattgggctgattgttgtttgtagacattttcactgtacagaggtaagacagacttttaaaagacaggataccacatttgtttgtagtgacataatctattcagattcagaactgcagggtctgtacttcatctctctctctccctccctcccttccctccatccctccctctttctctttcgctttttctcttctcttctcttctcttctcttctcttctcttctcttctcttctcttctcttctcttctttctctctctctctctctctctctctctctctctctgtttttgagatggagtttcactcttctttcccaggctggagtgcaatggcgtgatctcggctcaccacaatctctgcctcccgggttcaaacgattttcctgcctcagcctctcaagtagctgggattacaggcatgcaccaccatgcccggctaattttgtgtttttagtagagacagggtttctccatgttgaccaggctggtctggaactcccgacctcaggggatccgctcacctcggcctcccaaagtgctgggattacaggcatgagccactgtgcccatcctctctctctctttcttttcttccttccttccctttctttccttctttttctctttttctttcttgggttctcactctgtcacccaggctggaggcagtggtacaggcatagcttactgcaccttggaactcctgggctcaagtgatcctccagcttcagcttcctgagtagctgggaccacaggcgcatgccactgcacctgcctaattaaacaaaaaaaattgggccaggtgcggtggcttacacctataatcccagcacttacagaggccaaggcgggcggatcaccatgtcaggagttcaagaccagcttggccaacatagtgaaaccccatctgtactaaaaatataaaaattagccgggcgtggtggggggtgcctgtaatcccagctcctcgggaggctgaggcaggagaattgtctgaacccgggaggcggagattgcagtgagctgagatcacgccattgcattctagcctggcgacagatcgagactccatctcaaaaaaaaaatttttttttcagaaatgtggtcttgctgtggtgcacaggctggtcctggcctcaaacgatcctcctgcctcagcctcctagagcgctgggattacaggcatgagccactgtgtccagcctacctctttcatctacatttgtatctcctctccctcatgagtgtccaagctctagctatggtagaatcagactattaagtgcttttcatttgccatatcccacaggactcacgaagaatctatatgacaatgccttcactgctatcaacaatatgagagagtttaaaagtttttgttcagttatttttgtccttattagatatttctggaagtagaggttgaccagtctaacttcagtgttttaaagtcagctgcaatagtttaaaccaggggtgtccaatcttttggctaccttgggccacgttggaagaagaataattatcctgggccacacataaaatacactaacactaacgatagctgataagctaaaaaaaattgcaaaaaaatctcataatgttttaagaaattttacgaatttgtattaggctgcattcaaagccctcctgagccatatgaggcccatgggccacgggttgaacaagcrtggtttaaaccaacaactagatacacatttaggctcatttgtttcactttattttcaattttggggatttctcttttattcagttttgatttataactaaggaaatatttacaagattccaaagttagatctacaaacaaagaaatatttaaagaaatctaggaccaacatgtgaggatagacagagagagcttctattccttttacccccactgaaaacaaacaaaaacatgaaacttaatttgttactttataaacagtcttgtaaaaagtatttttactgctgtccttcctgtgtagatgtccacactgaagccgtgcaagcagctttggccaaatacaaagagaggaagatgcctatgccttcgaagagacgttctgtccttgtgcattcgtctgtggaaacctacacccctccaggtattgataaacaatgtcaagtgtggcttttttttgagtgtttcacaggcctgatgttatcctatttacttcccattgagttggaatatccgtctggcctgtagtatagattggacgcatttggagattaaaaatgtttgcatatgctcrtattccttacctgaaaatctatggtgtacatagtattcttacccaaatgggtacttgctttctataagactttttgtgtggatcttaatttcttttactaagatgctatttatgtcttttagtaaagagaagaacctaaagcactaagaggagcctaaaataagcactaagctaaagcttcctgaattaggaattttacagttattgtcatcttattacctataacttaacaggttgtaaccaggacttatatgcaacagtataagactatttggaaagttttgcggttgattttgttgttgttttattgttggtaccattagaaatgaaaacttttatatgaggtttctctctagcaataatgtattttagtcttcctgttaaactgyacaagatgtcgatagtgtctaatgacttcacattcatgaacttgcattgttgtcatatatttaaagtatcaaaaatagtgacacccatttttggtttgaggtatytggagatactacacaataaaaccaaacacaccagattcgtaagatgatttagtggttttggtaacactttcttgcttaaaagaagtttattgttgaaaaaaatcttagaaatggctgtcaaattattgtttttgctaaatatagctatagacactatccaattttaaaataatgttttaataattgtaaaacccataatgaaacacwcagtcatgctgacttgaagaaaccttaatgtacagttaattttgttgtctgaagcaattttctcggagaaggaattgtttttagggctagttcacatgactcccctgaaaggatgcatgtagacagggctgcggttctcccatggccaccatgttgttgctggggccatgcacaggccaggatgccttctcactgcctccaagatgtagggccgggcacaggctctcccctgggtgatgctgactgatgtgtggatatggtgtccgactctgtggacatgcagtgcagcactgaatattcacagaacacccccactgaggtatatgctgaagccgtttaggagatcagaggctgtcttcactgagtgtgtctggtaccctgtggctgagttctctctggggagctgggggctcatggaatcattttccccacagtagggcttcttgcatgcccttctagattgagggtgacctttgagctgactgcgtggctttgggcagagctgtgccaggtgtacagaagcatgctgcacacaggtctgggaggctccagtgtgagtgggaactccgtcctcctcttgactcatcccgatatcatgcctgtcatcgttattttaaccacagacacgtcgtctgcctcagaagatgagggctctttacggcgacccgggcgactcacctccactccgctccagagccattccagcgtcgagccctggctcgaccgggtcattcagggctcgtccacctcatcctctgcatcctccacctcatctcacccgggagggagasccaccactgctcccagtgctgcagccacgccgggggccgccgctaccactgcactcgcaggcctcgaggcccacacccacataggtcagtaataagctgctgcggcccctgtgccagcagagcggggtcaggagtgtccaggacagaggagcagatggagggcacctgagccaggcgccaccctgcagacttagctgcaggcctgagtgctctccaagtgactgaggtcacacaacccagataacccatactggcttatctgcctgagacattaaattgattttgagcttttaataattgcacttgaaagaaatgggctaatatttggttaattcatcattcagattaaatccctaataaccttttgaacaatacagctcagttgcaaattttttcccccatcaagacctacgtatttttcatctgggaaatgtccttttggtaacaaaagtagttgttgatacttctttaatttggcagtcctagtcctttggggcatggggcatttctcatagtcccccagaagggtgtggtgtttctcagtgtcataacaccttcctgctcttgaggggaagctggtgcatgcagtaggtgcaggggtagatggtcagcacacatccatacctgctggtggctgtgatcatcacccttgacctggccgcctctctgttgtctgtgcctttcctcttggctatgtgttcacagctgcaggcccattggttgtctctgtacctggctggaattctgaggttggggtagagggctttcgctcctccagataccaggttagacagcctttggcctgaaaaggtgtcagtcagagctaatcatatgatgcatggatctttcccaaatcatggaatcctttaaattacattcatcttagagatgaaaaaagtgtaaacctttcatcctttgaaattctattttttaactaaaacagcagcatagttagctgtatgtagctggcatgtgaaacccacatacactcttgcacaagtaccttaaaatacaatcagtattgttgaagactcatcttaatcccctcctttttttcccagatgaggaaggaagaaaaaaaagtccagcgattgtaacttgcttgagatcagacagcagccttaagtggtgaagccagggctgataccagttttcttgattcctattcattttctttgctttttgttgcttttctgccaaaactgaaaggtgacacctgtgacacgctggtgtttgtgctggggtccccatgggtgccgagctcttttttgtaagacctcggtcatttggctggactgggggcaagttgggtatgttgggtggcccacagcttctgtctcatcatcctctgtagtgtgcatcactgttgctcttcatgtttttgtttgtttgagtcagcacatctcttgtgtttccattgaacatgtgtccttcttctgaggcgtccgtctcagatgaaagctcacagtgccctgctctgtctccacactgcttccagctcataaaggaactgccaagactacaagggtagcagmaggcagcattttccacagagaaagtttctcttaggaaaacagcctgctcagattgtttctgtagctttcctgggtgttccatggccagaggctgctgcccacctttcctcaaggtggtgtacagtccatatcttgaaaacagcttttgcactgttgtttgccttctctgttcatcgttggtgatttaactttgtagaaatacatagttaactccaattctgaggcaggggcaggaaaacagtagttttaaatgttctgttacctcatttcttctcccagaagctcctttctaggtgagatggtgcaggagagcaaacaaaacatttgtagtttgagtttattagccattgctgagtcatctcaacactgtttccgggtgggttagaaataaaagcttattcagcatgaaaaattagccacagttcagaatgtttaaccgtacagccctcaactttccagtgattgtggggtgtctttaagcaaagcattgaactctaatgtgtgtttgaattagatgttttcattctctgaaaaggacttggctgcaattatttataatgtaggtttattacctatgttggtggaagacagctcctgactcctgcagatgcagctgtaatcatctcttcctttcttgttagtcctagcatcaacattttgtgatcaattctaatacatttaaaaaaaattcttaacttggacttgatttaatactttgcttacaggattgcaattttctacagattgtagctacccacatcctaaatgttggacatagttaatttgaatttctaaatctcaaaaatactcaacttccctcttatgacagaaatcatcctttgttttagtttctaacactagatgtgtcttcaatttaaactaaggaaagaaacatgaaaagaggaagaatatattaagtaaaaaattcgaggtagaacatatcaggtaaagataatttttaaaaatatatcactttcagttttggattaaggaaatcaaatacattaagccttttttatacaaatgtaaatacctatttttaaaagcagtacttttaattatagtagcttcttttaattatagtagcttatttttattttgaatgtagtttatgtttatttttatgcagcttttttttttatttttccacctagagacagggtcttgctctgtcacccacgctggagtacagtggcatgatcataggtcactgcagccttgaactcctgggcttaagaaattctcccaccttagcctcctgagcagctgggactataggcaaatgccagcatgcctagctaatttttaaaaattttttggaaagatggagtttttactgtgttgcccagactgggcttgaactcctgggctcaagtgatcctcatgccttggcctttcaaaatgttaggattataggaatgagccactgctcccagccattatatagctgttttaaaaaactacttgtagtacatgtatgtataccatgtatacctttttttccatatatacttttaaaatcatttattctttttgctagatttggaagagtggggaaatttctttttaaactaaaagaacctcctgatagacatactttaaaatgctaatttgatcagcatcaggctttttcaagggttgygaaaaatcttaacggtttagattttttcaaaaggtatattctgctatgcagacagtgagtttgtgctttcatatacttcagctttctacaaacctagtaaaaagttactgctttacattgtacctaggagtaccacagtgatactaacaggtaccttcattaaaatattaaacattaccagttgtctctacctaacatagactagtgtttatttatttatttttttggagataagatctcactctgtggcccgggctagagtgcagcggtatggtcctagctcactgtaacctggaacttctgggctccagtggtcctttcacctcagcctcctaagtagctgggaccacaggtgtccaccaccatgcccagctaatttttttttttaagagatgggagctcactatgttgcccaggctgatctcaaattcctgggctcaagtgatcctcctgcctcagcctcccaaagtgctgggattataagtgtgagccactgcacagctagtgttgattttttttttttttttttttttttttttgtgacagggtctcactctgtcccccaggctggagtgcagtggtgcaatcttggctcactgcaacctccacctcccgggttcaagcgattctcctgcctcagcctcccgagtagctgggattacaggcatgcaccaccacgcctggataatttttgtatttttagtagagacagggtttcaccgtgttggccaggccattctcgaactcctgacctcagctgatctgcccgccttgaccttccaaattgctgggattacaggtgtgagctaccatgttggcccctatgttgattcttataaatgggcgagcatctgtgtattcattgttgtggtagaacacaatttctatagtcatatagacacagtgcctttcctagtggtagacccaattataaccataattcctataggaacttacagtcagccagcattctgaacagatagatggactgtaccatggaaataaaacacaaaaatgtacattcagacaatggaaggagtgacttttacatatgttccagatctaatgtctgtttttaaatgttacaccaattctactttaagaacttgattgtggccaggcgcggtggatcacacctgtaatcccagcacttcaggaggccgaggtggttggatcacttgagtccaggagttcaagaccagcttggccaatatggtgaaaacccgtctctactaaaaatacaaaaattggctgggtgtggtggcacatgcctgtaatcccagctacttgggggactgagacaggagaattgcttgaactcaggaggcagaggttgcagtgagccaagattgtgccactgcactccagtctgggcagtgataaagtgagactccatctcaaaaaaaaaaaaaaaaaaggaacttgattgtggtctcttagttttgcagctgttttaactggcagtgggggaagttttaatttctgtagttttattcttttaggactgcaaaggtttggtgtccaacatacttttttgggggttgtagtagtttgtatgatcctggctgtttttttcataatgtaacaaaaaaatgtaccagtgacaattgatttcaaatttgtttctgcttccttgagggaatttcttccttccttccttccttccttccttccttccttccttcctttctttctttctttctttctttcctttctttctttctttttctttctttctttttctttctttctttcttttctttctttcttctttctctttccttccttccttccttctttctttcttttttctttttgagagagagtgtcgctctgttgcccaagttagagtgcagtggtgcaatctcagctcactgcaacctccgcctcctgggttcaagtgattctcctgcctcagcctccccagtagctgggattacaggcatgtgccacgacgcccggctgatttttgtatttttagtagagacggggtttcgccatgttggccaggctggtctcgaacccctgacctcaggtgatctgcctatgtcagcctccccaagtgcagggattacaggtgtcagccaccatgcccagccccttgagggaatttctaaccaaaatctcatsaggccattgtgacaggcaggtttactctgtgcctgcctctgtgctgaagatggtggttctgagtctggatccctttgagaattgagccacccacatgcacgcagatgtctgcataacgtgtctgggagttcatagggtcccagtatgcctttggtcagccaagaaaacaaattaatgaaaataccacactctccccacttagaactcagctagtggagctttagactaacggggtttcaagagcagcttaatactcatttgacttaacagccactttcattttgggtgtgtttttcaaaagcagatctgcattctgcccctcctgatgtcaccacgggcctcgtggagcattcgtactttgagcgtccacaggtggcttctgtgagaagtgttcctcgggggtgcagcgggagcatgctggaaacagcagatggtgagcctgcctctctttctcctcgtgaaatagcagaacacaggttttgtctttgggtattgaacacagctttaatgtattcactgtagcaaacccaagccaaacgtcagttttaatccatgcagataaatagaaaccagtgtgtgcagttaatgttatagaaagcatcatgtggagaaataattggaaatatcaatggaattggtcagaggggaaacgaggagagtggggagggaaaagacttccaaatttagataggatgcaaagggcgtttygatctgcaatatagtagggaaatgagaagctgtgggaagtttctttatttagattcaatgtggcagacagaatgacttagtcagtgcgagtgcacacacccacctatgacagaacagccccctacactctccatcytcagcagactgtgaaatcggtgcaacagcaatcatggtttcccatgtgcaggctcagagatgtcagtgtaactttcataatgtcctcatttacaccatttctttttgaaacagtcttcaatgtcttttatcaaaatcatgtcaatttttttcccaaaataataatttaaataaaaattaagaggagctcagagctagggcctatcatatatgttggtactcccaaacagagtgtcagattttgttgagggctttcatctccttgtccagaggcagaagaaaaatactgaatcaacatgaagcagtctgtacattggctagacatgtatttaattcaatttattactctttatatttaaaaaaattaagagcttaattaaagggtaattgacataatgaattgcacatatttaaagtgtacagtttcggctgggcgcggtggctcacacctgtaatcccagcactttgggaggcygaggcgggcagatcactaggtcaggagatcgagaccatcctggctaacgtggtgaaaccccatctctactaaaaatacaaaaaaattagccgagtgtggtggcgggcgtctatagtcccagctactcgggagactgaggcaggagaatcgcttgaacccgagaggcggaggttgcagtgagccaagattgtgtcacttcactccagcctgggcgatagagtgagactcctttctcaaaagttttaagacatttgtacagctgtggaaagcatcactacaatcaagatagtgaccatatccagcacgcccaaaagtgtccttgtgttccttggtcctcctctcttcggatccttctggctttccccatacacttcaggcagccaccgatttactttctgtcactatagattagattgcattttctagaattttatataaaaggaatcatacagcgtttacgtttatggtctgccttctaccactctccataattattttgagattcattcatgttctgtatcaatagtttactccttctcattgagtaatatttcattaaatggatgcaccacaatttggctgttcacctgttgatgtgtatttaggttgtttctagtttgggccggttacaagtaaagctgctatgaataatcaatcttgtatacgtttttgcatagatgggtactttcatttcttttgggtcaatacctagaagtagaatggctgaattatattgtaggtgtatttcacctttttttttggagactgagtctcactctgttgcccaggctagagtgcagtggcatgatcttggctcactgaaacctcgccatcctgggttcaagcgattctcctgcctcaccctcccaagtagctgggattacaggcatgtgccaccacgcccagttaatttttgcattttcagtagagatgggatttcaccatgttgtccaggctggtctcaaactcctggcctcaagtgatccacctgccttggccacctaaagtactgggattataggtgtgagccaccatacccagcctattttaactttttaagaaactgccacgctgttttccaaagtgattgtaccattttacattctcattattagtagtgagagtatcagttcctccacaccctttccaacagttggtattatgtttaaaaaatttcagccatcccaataggcatgtagagatatctcattacagtttcaatttgcatttccctaacggctgatggtgtgttgaacatctttttatgyacctatttgccatctgtgtatctcttgagggaaagtatctgttcatacttttggcctatttttttttttaattgtgcttgttttctttctttctttctttctttctttctttctttctttctttctttctttcttttcttttctttcttytctttctttcttctctttttttttttttttttgagacrgagtttcactgtcacccaggcagagtgcagtggtgcgatcttggctcactgcaacatccacctcccaggttcaagcaattctcctgcctcagtctcgtgagtagctgggattacaggcatgtgccacgatgcctggctaatttttgtctttttagtagagaccaggctggtcttgaactcctcgtctctgcctgccttggcttcccaaagtgctgggattacagtgtgagccactgtggccagccaaattgtgcttgttttcttattgagttttgagggctgtttatatattctagatacaagtcatcccatatgaggtttatcatttgtattttctcccagtctggcttgctttaacaatgcctttcaaagagcagatggtttacatttttatgacattcagtttaccaaatttttttatakattgtgcttttgtgtcatatctaagaaatttttgtctaacccaaggtcacaaatgttttctcctatattttcttccagaattttatagttttagtttttacatttaggtagatagttcattttgagttaattttagcctaagtatcaggtatgaatcaaagtttacatttttgtatgtgggtattcagttgttctagcatcatttataataaagaccattcttttcccaccaagtttccttggcatctttaatgaaaatcrgtagaccatgttggagagggaagggtctatttctgggctctgggctctgtgtgttgttccgtttccttatttatctgtccttacacctcgtatagccatgaccactgtgattttcttaaaattcttgaaattatacagtttgagtcctccaactctgctttttttttttaattttctgttcttttttttttttttttttttttttttaagacaaagtcttgctctgtcacccaggatggagtgcagtggcttgattttggctcaccrcagcctctgccttctggtgtcaagcgattctcctgccttagcctcccaagtagctggaactccaggcaactgccaccacacttggctaatttttttttctttactacaggtgcataccagcaagcttggctaatttttgtattttttagtagagatgggattttgacctgttggccaggctagtctagaactcaagtgatctgcccacctcagaaccccaatgtgctgggattacaggggtgagccactgtgcccagccccccattttttttttttttaaatagtgactctgttgcccaggctggagttcactgacatgatcatggctcactgtagcctgaaacttctggactcaagcaatccttccttctcagcctcccaaggagcagggactgcaggcacaagccaccacatccagataattttttattttttaaattttttgtagagacagggtcttgctgtgttgaccaggctagtcttaaacttctggcctcaagcgatcctctcctgccttagctaaccaaagtgctgggattacagctgtgagccactgctcctggctggccaatgactttttttttttttttttttttttgagaagaagtctccctctttcaccaaggctggagtgcagtggcgcaatctcggctcactgcaagctccgcctcccgggttcatgccattctcctgcctcagcctcccgagtagctgggactacaggcgcccgccaccacacccggctaattttttgtatttttagtaaagatggggtttcactgtgttagccaggatggtctcgatctcctgacctcgtgatccacctgcctcagcctcccaaagtgctgggattacagggccatgacttcttaacattaccatggaatagtcgtgacctcataaacttcctgaaagggacttggatgccccaggggtccctggaccatttaaaaaactgcttaggccgggcgcggtggcacacgcctgtgatcccagcagtttgggaggccaaggcaggtggatcacgaggtgaagagatcgataccatcctggccaacatggtgaaaccccatctctactaaaaatacaaattagccaggtgtggtggcgcatgcctgtagactcagctacttgggaggctgaggcaagagaatcgcttgaacccaggaggcggagattgcagtgagctgagatcatgccactgcactctagcctggcaacagagtgagtctccgtctaaagcaaaaaaacaaaaacaaaaaaaaacctgctagcttagaacaagtcctgtttcctggaaggcattcagtaagtgttttctaaatgaattgattccaaaatgactgtccagtggggcccacacttggatggatttgtaagctctgatgcatcgtgtggtttgtccttggaccttacacctgtgtccacttcttcagatgtgtcctggcctcagtgctcctctgtccttcccgtgacaggtgtccctgtgaacagcagagtgtcctccaaaatccagcagcttctgaacaccctgaagaggccaaagcgccctccactgaaggagttctttgtggatgattttgaggaattgttggaaggtaagagttgtccaactttgagcttttctgtttgtatgaaaagggtggccacgaagttgagaaacacaggcaaatgtatattatacatggatattgctatatatattctgtttccagactcagtggtcactgggtgtaatggtgaatttagaatcacatgactgcttcctttatttgagcaggtagaaaatttgctgctcatattcaagtgacttggcatttcataaaaattcttctacggttttatttaacttacattatttaaatgtttaatttaaactttaactctgaaatacttaccttcttgtggttttaaagtatttaattttcagcatagatttggctgcttttcagaattttagcctctcatatgtgaatgaaatacgtatttaggaagaatacacacatattttttaaaagagaaaactagcaagcagaaaccagaaatgaagccagtacaaacatgtgagtgtgtcgttagggccacaggggccccatgctggtcctactcgcagaccttggctgtttgtacagtgacactgctgacagccgaccagcccagagtctcctccacacccgaggattagacatagctttcaggagattatttccccgttgtaatcagatagtgtgtattagtcagggttctctagagggacrgaactaataggatagatgtatacatataaagggargttcattaaggcatattgactcacacgatcacaaggtgaggtcccacagtaagccatctgcaagctgagagcaaggaagccagtctgagtcccartgctgaagwacttggaatccaatgttctagggcaggaagcatccagcacaggagaaaggtgtaggctgggaggctaggccagtctagtctttccacgttcttctgcctgctttattctggccgtgctggcagctgattaaactgtgcccacccagatttagggtgggtctgcctttcccagtccactgactcaaacgttaatctcctttggcaacaccctcacagacacacccaggaagaatactttgcatccttcaatcccatcaagttgacatcaatattagccatcacacagtgcctttcaaattcagagtttattggtatgaatgcatcttagagcagtgtttcttaccacttgggcaaattttggttatacagctcctagaaaaagattaattctttttaaagtaaaaaacaagattaaagtaatctttttccaggagctatataatcaaataatcttttttttttttttttttttgaggcagaktctcactctgtcgcccaggctggagtgcagtggtgcgatctcgaatcacttcaagctccacctcctgagttcacgccattctcctgcctcagcctcccgagtagctggtactacaggcgtccaccaccacacctggctaatttttttttgtatttttagtagagacagggtttcaccatgttaaccaggatggtctcgatctcctgacctcatgatccacccgcctcggcctcccaaagtgctgggattacaggcatgagccaccacgcccagcctataatcaaataatcttttaattctttttctttgaacatagtgatagttgtttggatccctaggctgaagtggtggttctgcttgctttcctcctgtgtgagtgggccaccaggtcctatctccaggctgtggatacctggctgttcaccgctgtggtgccgggggtagcagaggtgccacagtcctgtccagaagttgggaaagtgggaaccactccaaggtcacctttgtctgtgaggttgtggtcaccaggatggtgggttgtttttaactttatttcacagccgtcrtcatccatgactaaagctcctttaatcctttggttagttgtcggtgactgtgatgcaaaaatcgaaacaaattattgtaagcttttttatagttgggattaaaaaacartattataaactatgaatgcttaaaaacagaatgtgttcgtggtgctctgaattgctgattttaaagttttgattttgcttgtagttcagcaaccagatccaaatcagccaaagcctgagggaagcgagacgagtgtgctgagaggggagcctctcactgcaggtgtcccccgaccgccgtcgctgttggccaccttgcagcgctggggcacaacacagcccaaatccccctgtctgactgccttggatacaactgggaaagccgtctacactctcacctatggcaagtgttaacagaaagcagttgtgcttctgggttagctgtagaatgtcacacacataacacagcatagacatacagcttgataaatattcctgagaaaccagcacagctggcagataaatagarcattgacctataccaggtacccatcccaccngaggggaccactcactgatgcatggtgactgccattgctctgggttcaagtgtttggagcgttctatgtatgcattctgaacagtgtagtttagtttcgtcttattttcaactttgtataaggggaatcaggcagtatgtatttctgtgtgtttgacatcttttggttccatactatgttttttttgtaacacaaatagtaagcatatatacaacctgatgaattcacagagtgaatatggtcctgtaatcagcactccaagcagaagtgttgctaggttcaaagcccctcacaccccttccacacrcaaagggtaactactgtcctgactgcccacactgttggctttacctgcctttaaacaagtgttcttttagtttattctcattgatggtattattttatcgtgtgaatatactggaacttacttacacactcttaagtagatggacatttgggtggtttccactttggggctattgtgtatagtgctgttagggacatgcttatgtgagtttcttggtgagaatatgtaggcatttgtgctaggtataaatgcagaagcagaattgttcagcattaggacatactgccaaacagttttccaaaggcagtgcagcagttttcactcccacaggcagtgagtatgtgaggggttccagttatctcttttctcaccagcttttgatattgtttatttcattatagtctttgttgtaggtgtgttgtagcacaggctaatttgcatttgcctggtgacaaattatgcttttcatatgcttattggttgtttgaatatccacatttatgtactattcaaatatttggctcatttctctgtttgctaatgctttcatctttcttttttattttttttctgagaaaaggtttcactctgtcactcaggctagagtgcagtggtgcaatcatagctcactgctgccttgacctcctgggctcgagatgctcctgcctcagcctcctgagtagctgggaccataggctcacatcaccacacccagctaatttaaaaaaaaaaacaaacaaaacaaaaaaaactttttttttgtagaaatggggggtctccctatgttgcccaggctgatatcgaactcctggctaargcagtcctcccatcttagcctctcaaagtgctgggattacaagtgtgagccactgcacctggcctcttatttctttgtatgtttcagataggcatctttcctgagatgcatgttttgcaaatgtctcctcactatttggattgccttttaacacttttaattatggcttttaatgaatgaaaagtcttaatgtaatctaacttacatgttgttttttttttcctgtattgtagctaagtttttgtctaatttagaaattttttaccaaacttaaggtcacaaagatattttcctgcatgctcttctaaaacctttattgttttacttttcacatttaggtgtgatgatccatttagaatttaattttgtatattgttggagtaaagttgtatattgttggtataaagttggagtcattttcttatgagtatctaactgactcagtatmatttattgaaaaggcaatcctttccccaaagtactgcagtgttactttgttatatagtgggtgaaaaatgtacttgcgggtctgtttctgggctcctsttggcggggggtgttgtcagtctgttgtctctccatgctctgaatcactgtagcattaggagtcctcttgctctgtgatggttcctcaagattgccttgactcttcttggctctttgtatttccaagtaaactttagaattaacttgtcaatttccataaaaattactactgggatattgattggcattgcattgaatctctagttcaatttgartagaaytaatgttttataggttgagagcatcccaaatatgaaaatccaaaatccaaaatgctctaaaatctgaaactgcttgaagctgacatgatgctcaaagaaaatgctcattggagcattttggatttctgatttttggacttgtgatgcgatgctcaactgggaaataaatataatgcaaatattccaaaatctaaaaaaaaattgaaatcccaaacacttctaatctcaagcatttcggataagggatactcaacctgtattacaattatggaatcttccagtttatgattgtggaatattttcccctttttaaaggcctgcttcaatttctgtcagtaatgtttttatactttggaatacagaagtcttgagcaccttttattagatttattcctgttacaagtgctgtaatttgtaattttctctactgatttgttgcttatatatagaattgcaatctatattattattattttaaaatgatgactttgtgctgggcgcggtggctcacacctgtaatcccagcactttgggaggccgaggcaggcggatcatgaggtcaggagatcaagactttcctggctaacgcggtgaaaccccgtctctactaaaaaaaatacaaaaattagccgggcgtggtggtgggcgcctgtagtcccagctacttggcaggctgaggcaggagaacggcatgaacccaggaggcggagcttgcagtgagctgagatcgcaccactgcactccagcctgggcgacagagcaagactccatctcaaaaaaaaaaaaaatgatgactttgtatccagttatctcactaagttaacttattagttctttgtttactcataattagaagtttgtctatatatcttttgtattacctgtctacaaaaatcacattattggtgaataatgatagtgttattttgtcctttccaatacttaaacttttattctttttttttttttttttttttttggtttttttttttttgcacaagctagaacctccagtacagtgtgaaatagaacaatgttgaagagtgggcattcttgcctgtttttccatctgaggaaaagcctgtggtaattaagtatgatgtgttctgtagttttgtttgcttgtttgttggtagaaactgtcagattaagaacgttcccttctccttgtttgttaaaagttgttatcatgagttgggattgaattttgtcaaatgctttttctgctgctagaaagaagatcatatgattttcctccttcattaatttggtgaattattttgattaattttctaatgtaaagcagccgttcatttgtagaataaatcccacttggccataatatcttacccttttaaatatacacccagatttaatttgccaataagttgtttaggatttttacgtctgttttcattagaaaaattgatctgtaattctttaagaaaggagcccattgccagcctttgatgagtatgcctagctcacagcctcaactgttaaaccagcgttcaaatctaggtcatgctattggcagagcagtccctggccaatggccaagtaaggcagtgggacaagggcctagtttctgttagcatggactttccttaaaaacagcattgggcttgtggagactgtcagttctacattgtggcttgacagctcctcctgcccaatcttgctacctgtcttttcctatcacagatttttattctttagtaatccttttgcatgcctgagcctttctcagcgtctgctttgtgaagaacccagcctgtgacacacttcctctttttttttttttatatattctccttggcttgcagtttaagtctgcatttatttacaaagtgtaagatattactaccattgtgtgtatttatttatttttttgagacaaggttgtgttcggtcacccaggctggagtgcaagggcgtgatctcggctcactgcaagctccaccccccaggctcaggtgatcctcccacctcagcctcccttttacctgggaccacaggcacacaccatcatgcttggctacttttttgtatttttagtgtagtcgaggtctcgccatgtggcctgggctggtctcaaactcctgagctcaagcagtctgccggcctccctcccaaagtgctgggattacaggcgtgagctcccatgcccggcccattgttttttgtttgtttgttgttttaatcaaccatacatttttattctttcttttactatatacattccttcctgagattctgtattttcctgggtaatcatttccttctggcctgtagaacttcctgtatgttcgttatactgtagctttgctggcaacttcatttttgaaggttatatttcgtggtggtttatcttctttcagcaatgcaaagatattgtttataggcttttgagaagatgccagaccattgttgctctattgacagtaatgtgtatggccgcttaaaaagtgttctttttatttgaattgcagccgtcttactatgacatttagaggtgatgttctttgaaaatttcctgtgatgttctttgaaattttcaagatgtccacagggcttcttgaatctgtagaatggtgtctttcatctgtttgagaaaaattacagccatcttctcttactatattgcttcttcctcactttttttcttctctccttctgggactccagttacacttatactttttccctgagtcctacatttttaatgttcttttttatattttgcattctttcttatatatacttcaatttgtatattttctattttcctttattcaaattctttaatcttgtcttctgaaatttctttttttttttttttttttttgagatggagtctggctctgtcgcccaggctggagtgcaagtggtgcgatgtcagctcactgcaagctccgcctcctgggttcacgccattttcctgcctcagcctcctgaatagctgggactataggcgcctgccaccgcacccagctaatttttttgtgtttttagtagagacagggtttcactgtgttagccaggatggtctcgatctcctgacgtcatgatccrcctgcctcggcctcccaaagtgctgggattacagccrtgagccaccgctcttggccctgaaatttctaatctgctgtgaaatcctgatgagttccttattttagatattgccttttcagtttagaattttcatttctytattatagttactattctaatactctggaaaaatttctcattattccatacactttcctaatctttgcttctgctgccttgaatacacacattaattattgtaaatgaaagtctttgttagctaacaccaatatctgtatcacctttgggtctgttgctcttgtctgtgttttctctctctttttttttttttttttttttttttttgagacagagtcttgctctgttgcccacactggagtgcagtggtgatcacaactcactgcagccttgacttcttgggctcaagaggtcctcccaccacagcctcctgagtagctgggactacaggtgcacagcactacgcccagctaattttttctttctttcttattttcttttttttatagagatggggtttcactgtgttgtccaggctggtcttgaactcctgggctcaagtgacctgcctgcctcagcctcccaaagtgctggattacaggcgtgagccaccatgcctggcctttttgattgaatattgtatgttgtgtataaaaacattatggcaggtccagacaatgccatcttccttaagagaaacctctttcccctccaagtagagtagtggctggctggtcgctgcagtccagtcatgcctggcccagccggcctttgctctcctctggctctcctgggctttctgccagtgcctggtgtgtccatgtgtctctttcctctgatggcttcccagccgtggcgttggtctcctcgtggcttcttaacaaccccattctgcttttcagaggttttccacatgggctcttggtctcctgctgcacacagccagaggattcagcacatgtcctgcaggaggtggctgtgctctcgagactcctagcctctaccaaaagctctgcaggtttcttcatgtcctggtgggactgctccaggtggatactcagccccccgtgggggctggaatccctgaacatggacagcgtaaagacagctgcagctcagctcactttccggagggttttccctctctggaatcttaactcctctagttgtctttgctgagcagcaacttgctgcctccaaaagatcatttctgcattttattcagtttttaaactcatcttaggcaggagtgctggtctgccaccagtaccctctcctactcggaagcagagtcttccaccatkgtgcttttaaaattcatccatgttattgcgggtagttgtaattcatttatttctgttgaggaatgaatatatcagaatttacttaagcattatrctgttgctggaatacatgggctgtatccagttttagctactagaaacagtgctcccaggaagattctggtgtgtgccacgtggtagctaagcatatgtttctgaaggttgagtacttaggagtggaagtactaggtctagggttatgggcaccttcacattgctgagatggcaycaccgttctccagttcacccttggcccatcagtgtgggtgggccctacctgctccccatcattatcagcacttggtattgtcaggcttatgaattttagctactctcgtgagaatatggtggtatttcattgtggttttaatgtgcattttactgataactaaatagattgagatctttcctgtcattttaacttgctcttttgttaagtaccccttgaatcttttacacattttttctgtagtgaacggctgggcacggtggcttacatctatactcccagcactttgggaggctgagatgggtgaatcacttgaggctaggagtttgagaccagcctggccaacatggcaaaagcctgtctctactaaaaatacaaaaatcagccgggtgtggtggcatgcgcctatagtcccagctactcgggaggctgaggcatgagaattgcttgaacccaggaggtggaggttacagtgagccaagattgcaccgctgcactgcagcctaagtgacagagcgagaccctgtctcaagaagtatatgtaaataaaatgaaaacaagtttattaagaaagcaaaggaataaaagaatggctactccataggcagaccagcagcttgggctgctggactaagaatacttagagttatttcttgactatatgctaaacaaggggtggattattcataaattttctgggaaaggggtgggcagtttctggaactgarggttcctcccattttagaccatctaggataacttcctgacgttgccatggctgctgtaaactgtcatggcactggtgggagtgtcttttagcatgccaatcattgtaagtagtatataatgagcagtgagttcaaccagaggtcacttacattgccatcttcatttgcggggacttggccagcttcttcaccacacatgctgttttatcagtaaggtctttatgacctgtatcttgtgccgacctcctatctcatcctgtgacttaraatgcctaacttctgggggtgcagcccagcagatctcagccttattttacctagcccctattcaagatggagttgctctggtttaaacgcctctgacatatttcccctctctgttttatgaragaagccttaattctaaaggttgtaragggacaaagattcatcttctataacttcttcaggctgaacaggagtgatgacattcctgcctaactattagggtcttttatatttgagaaagaaaggagctaagtcagaaagcatcagtatggtgagggccattcataacgccaagaaaatttggtatctggaagattaataagtgttcagtttaagaaaacattgagtaagcttatcctgcattcctacacagagtacaacagcaatatattccacaacagtaaaacaaaataagtaaaattatcccaagtaaattaaatagggattttcatgaactgggtaactgttggaactaagatgatatgggattgctagctgattccagtgtgcccagaattagaatattgatctagattttttttttttttttttttttttttttttttttttgagatggagtcttgctctgctgctcaggctggagtgcagtggtgcgatctcggctcactgcaagctccgcctccagggttcacgccattctcctgcctcagcctcccaagtagctgggactacaggcacccgccaccacgcccggctaatgttttgtatttttagtagagacggggtttcaccatgttagccaggacggtctcgatctcctgaccttgtgatacacccatctcggcctcctcaagtgctgggattacaggcatgagccaccgcacccagcctgatccagatttttacattacccatctctcttgtttctctctactttactcaattgttaaaagctgtaaatagctcaaaagagaagttttcttggctctgaaaaacaaaacaaagaatcagcaacaatttaagcaaaaagtcaaaacaagttacttctgttttctactggttctattagtcctattagttcagctcatgtcaaaacaagttacttctgtcttctattagttctgttagtcctattagttcagctcatgcagttaactcctgttcgatattcatgaacattttggctctccatgagagtcctgaaagtttttcctctattckaatgtcrcaacctccaaagttatcagaaacctgcattcaaaaacacctgttagagttctctagttgattataaaaccaccttctaaagaggacccaaacaagacaacaattttgtatggatgacagaatgccttagggcagcctctacaaaagccacaattgactaggaattttgattacttctgtgacatggaacaatttaacataccaattatattaataacatgtactgtcatatcagagttatagaagtttcacacgattttggaacacaaaccaataacatatttatacaaatatagcccaaagaaagccamgcatcatttcatatctgacagtgcttgctgtgtgatttttataccaaataagctgaatatgtcattttttggacttgagaggacctaatatctaaaagattaattaggtcaggaaaaggcagaatttagagtatgatgttggaaagtttgtcaaatattaaaggtttaaacgcttgatattacaaaatagaatcccaggtcaccataagtcattcatttacccaaaatgataactcaaaaatttttaaaaggcaaaatcctttactcattaatagaaggaaracttagctttccaaataatctgtctcctttctttcccttctttttcctatagtttattcaaaaggcaaacaaaaatctttgttttcttttctttttttttcctgagacggagtctcactctgtcacccaggttgaagtgcagtggcgtgatctcggctcactgcaacctccgcctcctgggttcaagcaattcttctgccccagcctcctgagtagctgggactacaggtgtgcaccaccatgcctggctaatttttgtatttttagtagagaccggttttcaccatgttggccaggcttatctcaaactcctgacctcaagtgatctgcctgccctggcctcccaaattgctgggattacaggcatgagccattacacccagccatctttcattatttttttaatataaaaatcctgctcaagggagaaagcaaaatttcaccattgcattagcgcattattgatgtcaaacccaattcttaataaaaccttgtagacaaatctattcaaccataaggtaagattctcataaaccttttataaccctttacactttttgttaaagagcagattcatgctccaagaaaactgttgtgcttttattccagtattcaatttatggaaaaactgaataatacccctttaactttaggccagtgtgttcacacacaatttcttttacaagattaatttttcacaaaccttccacaacttgctcaaaccttcagcattattctatccaactgaaaataatcctttaaccctttaatctaggcaaaaaaaaatccacattcccatgacttcttacaatctttttaccaaaaacacatttcactttcygtgcacatttcacaccttgcaggtagaactgcttttcccatagtcccatagtctcaagtrcatgttacattgttaaccgaagaagcagtttatgaccgtaaagcatttagcaaacctaatatctgacctgtctaatttagaccaaatgcctaaatttttgaagatatttttattttaccaatagtctttaaaactgtctttatttcccaaaggttacttaagtcacatgaactaaaaggcattacagttttaatttttctgacaagatatttggtttaaggtcttagtatttttaaaccagttaatcaaagctctttcatatataaacatcacacacataacatgtaaatagacagaagatccaggagacgtaagattttccattttccagtttctaagtttcttaactggattactggcttcagggtggagctctttgctaaacagggctagggaaacatgcagtttctggagcctaataagcagctggaaggcaaagcagattccaaaaatcaaagttctcatttctataccagatactggatcctcaaaaagggaatcagcccatcccccatgggagtgttatctctcagtggggcttgggggacatttccataccttctaggtggccaagagcatgcttctctgatccaaacatgcagagaggtgtgtattcccctacaactgccattagctacccccaaagtatatttcctccctagttattacaccagagctctctcgtcatgtgaaatcaaaaccgtcagataacacagtgctgcaaaacagagcagagccttagattttgagattttaaattttaaattcctggggtttcatgaggaaaacagaggttcttcccaaaatggggtctgtggctcctcctctgtttcccccaaagagtcccaggctgttagaccttgaatatctgcttttaaggtgacttttaaccatagtgctcttttatttttttaattaattwaaaaaaattttttttttgagatggagtcttgctcttgttgcccaggctggagtgtaatggcgcgatctcaggtcaccgcaacctctgtctcccaggttcaagcgattctcctgcctcagcctcccgagtagctgggattacaggcatgtgccaccatgcccagctaattttgtatttttagtagagatggggtttctccatgttgatcaggctggtctcaaactcctgacctcaggtgatccacccgccttggccttccaaagtgctgggattatagatgtgagccaccaatgcctagcttcttatttatttatttatttattttttgagatggagtctggctctgtcgcccaggctggagtgcagtggcgtgatcttggctcactgcaacctccgcctcccaggttcaagcagttctcctgcctcaacctcctgagtagctaggattacaggcgtgcgcctggctaatttttttttttttttttttttttttgtatttttagtagagacggggtttcaccatgttggccaggctggtcttgaacccctgatcttgtgatccacccgcctcagccacccaaagtgctgggattacaggtatgagccactgcacctggcccatagtgcttttttttaaaattccttttaaatctcttattacccaacttcagccaggccttacggccaaaggtaacctcccaggtgaaaacaataaactttagccaataagctacagtattgggcacttggactattcccagaagaagtctagagcatccaattctgagcttgcaaaggcttttaactgctcgagataacctttagagctaactatgatatgaaccctcaaattcctgttcactcggtggaaaccaagagaaagtacctccgcgtggttacaagtcaactcccaaggacatttttcaacatgtggtctctgggcaagatgaaggagcagttgccctgagtaacagaaaagatggaaaagagaaagggagaaaagcattgcctatggcagtatggggaaggtgaggagctcagggaggccggagaaagacccagccattgcggcgacgctgaatcaaaagttcaggcagccgcttgtcagtaatgaagggatcttttccagctgtcccgtcagctctggagtttccccttttggggagaaaaaatgctcccatgttccatgatcctgtacatgcctaaccttgtcacccaaagccgtcagcaaagagtgcaaggcagatgaatccagagagaatagtggttaacattctgtagtgccagatccattcttggccacgagggactttactgaagggggaccctctaaccccttatatcttaggaaggtctctaaccttcccaagttgggcctcgaacccaggtttgttcaagtgcccttgccttttattaagaggggcctttaacccactctgtcttaggagaaactctgactcccctaagttgggactctaacccagttccatcctttaccctggtaaatgcaccccacttacccaaagtcggccaattggtgctgtggtcttatctcctttgggtcgggggtctcctcagtattgtccctttggaattcaccgggaagatgttcccagaaagggatcctattccagaccccaagagaggctccttggaccttgtgcaagaaagaattcagggcaagtcagtgtagtaaagtgaaagcaagtttattaagaaagcaaaggagtaaaagaatggctactccctaggcagagcagctgcaccttttytaatacaggatcatttataggaattttttatattatattctggatcccagccctgtgtcagtaataccttgcgagagttctctccctctttgtgkctggctttccactaatggtagcttagtgaacagaagttctatcaatcaccttcttttcttttatgatttttgctttttgcttttttttttttttttttttttttttttttttgagacagagtcttactcttttgcacaggctggagtgctgtggcgtgatcttggctcactgcagcctctgccttccggatcaaacaattattacgcatcagcctcccaagtagctgggagtacaggkgtgcaccaccaggcctggctaattttttgtatttttagtagagtcagggtttcactgtgttgaccaggctggtctcgaactcctgacctcaggtgatccacctgccttggcctcccagagtgctgggattacagttgtgagccaccatgcctggcccgatttttgctttttatgttctctttaagtactgtttcccttggctgagatcaaaacattattccattaatttgggaaaatgctgttgttttactgttcacatttaggtctgccattcacctggaatgtgtttttgtgaatggtgtgggactgggttcccgggttcgtttctaaagaaagataacctactgtcccgttcttgtctaaggaggagacagcccttgccccactcttctgtggtggcacgtgggtcatcagttgagttgtccacacatgggtggatctgttttgctgttctctgttttatttcactgatttattttctatctttgtgcctataccacactgtcttaattgccatagttttataataagtcttgacatctgtagagaaagcctgccatcttgttttcttcttcaaaagtatcttacatgctcactttggcagcacatacactaaaactggaatgatgtagagaagatgagcatggtacctgtgcaaggatgacacacttttgtgaaatgttccatatttaaaaaactgaaaaaaagagtgtcttagcaattcttaccctgtgcatttctggatccactttagaatgagcttatcaggtgtcacagtatacctactgagattattagcattactttgagtcttaagagaattaacacctttgcattattattattattattattattattattattattattattattattttgagatggagtttcgctcttgttgcccgggctggagtgcaatggcacaatctcagctcactgcaacctctgcctcccgggttcaagygattcttctgcctcagtctcctgagtagctgggattacaggcgcctgccaccacacccggctaattttttttatttttagtagagatggggtttcaccatgttggccaggctggtctcgaactccagacctcaggtgatccacctgccttggcctcccaaagtgctaggattacaagcgtgagccacccgcacctggccacctttgcattattgagtcttccagcccttggacatctgtccctccattcaaatattttttactttatctcagtaatgtatggttttctgtggggagattttgcatatttcttgtgacagtctcaagtacttagtgtgtgtgtgttttaagcttgtggtggatactttcatcaaaaacgttcattcctttttttttttttttgagacagagtttcgctttgttgtccaggctggagtgcagtggcacgatcttggctcactgcaacctccgcctcctggattcaagcaattctcatgcctcagcctcctgagtagctgggattacaagtgcctgcctccatgtccgcctgattttttgtattttagtagagacagggttttaccatctcacccaggctggtcttgaacgcctcagctcaggcaatctgcccgtctcagcctcccaaagtgccaggattacaggtgtgagccactgcgccaggcctgtttactctgtattgctagtatgtagaaatcaaatggtgtttgtatgttgatatatttagcagccttgctaaattcagttacaaaagattcataagctacaccatcgtgtcatctgcaaataatggtagttatatttccagttgttcagctttttctccctttttgcactggctaagcctttcagtaaaatgctgaaaacagacatcctttacttacttctctcagaggggaagctttcaatatccaaccattaattatgatatttcctgttgggtttctaaagatgccccttatcacattaaggaagtatgtttcyttttattctgagtttaagaagaatttcaaaaatcatttaaaatcattttaaaatcatgaatgatttaaactgtttttcttttcttccatctattgatatgattgttttatttttcasctttattttgttaatgtggcaaattatgtgggttttctgttgaacctctttgcattcctgagataaaactgacttggtcatgatgcattattctttttatgtagctggattcagtttgaaattctttatgcattacaattattaacaccttaaactgaccttttaaaataggctaaaacagtggtttgagttgaggttttttttttttttttttttttgagagggagtctcactctcgcccaggctagaggacagtggcacagtctcgtctcactgcaacctctgcctcctgggttcaagcagttctcctgcctcggcctcctgagtagttgggattacagtgtgtgccaccactcccagataattttttgtatttttagtagagacagggtttcaccgtgttgaccagtctggtctcgaactcctgacctcagatgatccacccatcttggcctcccaaagtgctggaattacaggcatgagtcacygtgcccagtctagtattttttttttctcattcatttctcaggtcccacagttcacttatttcatagtgttgcacctgagcttcatattattacacgggaaattgagcgctcatttgcagggcatggctactcaacctgcttgcgttgtgccacagggacttaaagggctcagtgatgactttgtgttgcttctttgataggctgcttggtgagggggtgttaaggctccttcaagtgtggggggttagactcagatttctcagtcttcctgtcccatggtcacccctgcctctgtcgtcctctctagacacccccagtcctctaggcttttcctttctctattgtcctgtcttcctcagtgaagctctcccctattgagtgcttatgagcatagcagctgcgccaggaggggtgtgtggtgggaaggacctcaggggataagagctggttcctgggccctgtgcctggcgtgaggtcctgatggctttccaagtaaagaatggatggcattgatacccggatcacctttggatctgttgctttggtttatattgtctcttgatttttggtcaggggaacttctctttggggatggctggtattttaacatcttaaatttaacatattaaattaggaatttaacatgttaaaacaaagatatgacccatttcatgaattgttgtaaagattaaagaaattatgtgctactcttacaaatgatgtaattgagggatatttaacgtaatgaaaatccatttacaatgcaatattaatttaaaaagtagggtgaagtatctcatttcttgaaaattttacaggcatgtatacgtgtttatatgtgtatagctgtatatatatgcacacatatgtacatatacatatgtataccaaatactgastttttctgcttgctttttttttttttttttttttttttttttttttttttttttagataatgtctttattgcccaggctggctctcactgcaacctccaccttccaggttcaagcaattctcatgcttcagcctcccgagcagctgggattacaggcacacaccaccacactgagctaattttttgtatttttagcagagatggrgttttgccatgttggccaggctggtctcaaactcctggcctcaagtgatctgcctgcctcgtccttccaaagtacagggattacaggtgtgagtcactgcaacctgcctctgctggctcttctgtagtccagattttctgtaataaaatcctattttatttttgtattaagaaaaataaatctgtaagctatttttaagagaaaacaatgatgttcattacaacattgtgcagaatagttattagttggaaactacctaaatttccactaatggggtaatggtatatttcggggtattttggtttctacattaaaatgttaattacttgtttcttaaattttacattgcttagtatttttattttgttttaggtaaactttggartcggagtttaaaactagcttatactctacttaataaactgacaagtaagaatgaacctctacttaaacctggagacagagtaagtaactagaatgtcactttgttggaaggagcaaaagcagggacttaaataatctgtttcattgaaattagtgttctatcatttagttagaattacagcattaatacaagggatttaaaatcagcagtgaggactgggtgcggtggctcatgcctgtaatcctagcactttgggaggctgtggtgagcggattgcctgagctcaggagtttgagaccagcctgggcaacatggcaaaaccctgtctctactaaaaatacaaaaaattagctgggcgtggtggtgcgtgcctgtaatgccagctacccgggaggctgaggcatgagaatctcttgaacccaggaggtggaggttgtagtgagccaagatctcgccactgcactccagcctggcgacagagtgagactccgtctcaaagagaaaaaaaaaaaaaagcagtgaaaaatattaaatatggcaaagtttgtgatgtagagtaaagcagcattctttttctgcactcgttgtttcattgtttgtccactgtttcttcatcttcttttctgtttgacttcatatatgttgatattaaaaatgttagattccagagcttagattttatgaattaaaatctgaaggtctgaaaccctgctgtgaaattctgtatttttatctccttccctattctatgtgtccaggtaacctccttgtacctatctgccaaaataggatgctggagacttattctcttgtgctacactgccctatatggttggcagtagccatttggggctatttaaattaaccaaaattaaataaaataaaaaatttagtttcttggttgcacaagccacatttcaagggctcagtaggagtgtggctagtagctactgtatttatagatcagaggtagaacatttctgtcatcatagaaacttctgttggacagtactactgtaggcaagctggaccagaccggaggaccctggtatactagaaagtccagggtggaaaataggagaacatggtgaaaatcaacataccagtgaaatcccctagtgagaaggtcacctgtgtcagatcacccaacaaggaaactgcaggttaacaagctggcagacagttccaagtagctctttcagtgcctaagtctttaatatgaactattagccaaggacttttaagaaggaaatgtcaatatgagagaaaataccaaaagacaaagaaaagggaagggaagagagggagtgagaaagagacaagaaaagtaaggaagggaggaaagaggaaacaacaaggaaagctagatacagaaaacaatgtttctaaaaagtgagtattaatattcttggaaatcagagatgaagatgtttcataagtcaagaaaaggatgccggtaggaaagactaagagatggagagcggagtaaaataggacaaaaagactcgatcaagaagacacaacacctgactgataactggagtcgagaaagagaaaggagaacagaaagtagaacattttaaatgaaaatagtaattcaggacaatatcccggacctggagagtgtaaacattcaaggatgcacaccaaaacgcatgcccataatattgcataatacgaggggtacagaaaagaatcccagagctttcaggggaaaagtaggatgtacacaaaggattggcaatgacagtggcttttgggatttctcattggtaaaactgaaagagagtggaatgatgcttcagacattcagagggaatataattttaacttaaaattctgttcccagagattcaacagatttgagaatagtatagccattttcagacatgcaggactcagaaacgtttggctcgcaagcactttcttgtcaagttcttagaagatgtccctcagccacatgagtgagtgagtgagtagggtgcaagcaggaggaccacagtggaggccccaggacgatcactggcagcagtccagggggggcagcagagccaccatcaggagaaccaagactccagggtggggtggaatcctcagcacccaccatcaggagaaccgagaccctcagcagtggagtcctcagcagcaggggacactcacggctctcctgagtgggtggttatttggaaaatgacccaccagtaggtgggtatttgacccagctgagggagtattttaaaacaaattagctagagaatacacagaaagcaacgcaagtagaaatggaggtagctgttatcagaaaagaaaggaaatgtgtacttggctataaaaatgtaaacagtttaagaataatactttatgatatgttgtgctcatagatgagattttatgcaacgctttagaatgaattcaagaatcactaattttcttgaaaaacattcttacaaggataaagactttcagattcttgacttgcaagagaatctctttggttaggtgaatcataataaaatggacaaggtcacagtgattgagttgaagaaattggtggcaaattctgcctcctataatattacactttataaaagtgagcacagctcttcctaacaaattctgtaaaaatatactttccataccaaacatctagtctgaaggttataggttacattctgggcaaccactgttaaaaccaaattttgaaggagaaccttgcccttttcaacaaacaaacttgttagaaactaaatttccagacctcaagtacagaatatagatacagcttaaattttgtcttacaaagtcagcacttattggttattcattgttgcgtgttctcaaaggccctgagtcaactgtctctactcagttaaatactrtttggacttgtcccttatggtttcaagcacarttattacaatatttggggcttacaaaaattttatttataactagcttttaatttaactagatattgtaaaaattggaaatttggaatattcatttctttgtcctgttgtaggtggcgctcgtgtttccgaatagtgaccctgtgatgttcatggttgcattttatgggtgtctcctggcagagctggttcctgtccccayagaagtgccattaacaagaaaggtagcaaacccatggctcaggtcccgtgtggttcgcttctgaacttgataccagcagtatcttacttccttttcactcatgtgggcaggcagcaagcagctgttttgacagaggagagaaagctagtagtcaacaggctggccaggactcaagagaaatcagatgccgttttgcctgcctctcttcttgttaatgagaggggcactgagaaccrttttgctggtgatgctcccacaccacactcttattaggtggagctgttctatcatctacatgaatttcccaacagaaatgatagccattttttcctytaatgaatagaattatgattcaataagattttgttcaacttttcctcaaaaccatatgtttatagaaaataattattatttcttagggataaatatatcattacagtgatatagctcacttctcagtggcagttttgaataaacgagatggaaattatcttgcatttctgttcacttatatgaccgtasgcagtttctgttgctgataaattattaatgtggggtcttgctgatctaggtatctgtaacatttttgatataactatcaataatatgattactgaaaaaaaatagacaaggcatgaatttgagaaaatcagttttctgtcatcctgtcccagaattcaggcagttgttaacaggagcattatccagaaatattcaagaatcccaaaagtaaaatttgcaaatcaaactagtgtatctcaaagsataatatgtgatgggcaggtatttgaatgcagtggttcttaggagtaaaactagagatttgtcaaatttatatgaagaaaatgacagaatactgctgagggacacagaagacttggctacaaggaaatgtgtttctgtgtggaaataatttaatatcgttngtgaccaggcctctctagattaatttgtaaatttcaaacatgattcaatagaaatttcaatgccattaactttggagtttattaaaaatgcttctaaatgtcatttgtaagaataaactttgagaaattagcccattaaactttatatttcaacacaaatacaaaccaaaattatcttttaaatttaaacatagttgtcacattttcatgaactatttccgtgaaaagatcatatatatcaataatgggactgaattattctggaagttttatgagggatgaaaaaaagatctgttstctgtgcatggcctggagcaccaagggtctggggctgtggctgctgtgagcaccccaccccacacggtcactctgctttctgcaggatgcaggcagccagcaggttgggtttctgctgggcagctgtggagtcttcttggccctgaccacagacgcttgtcagaaaggcctccccaaggcacagacaggagaggtggcagctttcaaaggtgaggcctcccaagggaaggggagtcagtgttctgactgtggtctgtgttaaatgcatggtgttccagaaattaaacatgacagaggtgtctgggtcttcagcaaaagtgatcccttgttcgagtccttggtgaatctcggttttcatctggcttcatgtctcnacctgtactgtctaatgtggtagccactggccggatgtacctttttaaattatataaaatgaaatgagactaaaacttgcactccttattcgctcagtagctagtgctgcatgttggaggcgcaggcttcgagtgtggggagcagatgcctctgactgcttgctgttctgtgtcctgtctgtgtgtcacaggttggcccccgctctcctggctagtgattgatgggaagcatctagccaagcccccaaaggactggcaccctctggcccaggacacagggactgggactgcctacattgaggtaatgactgttcctaacttagagaatgtaaaaacatgtcycacaggcttaagtcttgcttttcataagaatgtaagttgctattcttttttgttaagtttcggcctaagagttcttgttttatctctgccctggaaatacagagtgtcatataaatccttgctcagatccttccaggtttctctctcatctmattctctsctaactggctccctggggatgcagrcagttatgagggagcccatggcgcaccattaccctcgggcacctgcccaagaggagccacaacttccactgaagcatcccctcagcggccagggttttgccatgtacctgggctgctggttagaggccgatggttagaggagagacactgaccacttcttcttttgaagattctaccagtttccattctgtctgttgtcacctctagaaataccacatcatgtttttttccttgaaatctttcagtataaaaccagcaaagaaggcagtacggtgggggtcacagtgtcccacgcatccctgctggcacagtgccgggctctgacccaggcgtgcgggtactcagaaggtaagggctctcgggggtggggcggtggcccctccagcctcacacagatacctgacgtacctaatcatgtgactgtcactgcacctgtcaaaaccacccctgggtagtgcctttgcccattaatccrggtcatgccaggtagggagatgcactgtctttagcatgcttacagggtctctgtggttgtgctggccaagagggcacacggtgtctcttagcagagtccagacaaccccatcagggttgttttcagtaaatgcacatggatgttgattttatggaacatggaacctatatcccactgattgatttatacacagtgctgggttcacaggcctgccctggggggctggcttactctgtgacatactgagggtcagggcatttttcattcaaaaagaggaaaacacttttagttttctattactttatctatgactgtagttttgacctcagctgtcatggatataaatatrtaagtagaatctttatggttatagatgatctgttgataaagtatagtcagcacctgatttacttcaaatgtcagatacttaacttgagatatctttaaattaatattatttaattgataagtactaattgtatatatttatggggtacactgtgacaattttaaaaactgtaaaaatggactcagtagttttcttacattgtaatactagaattgaacaaaactactgagtgaaattgaatggtatgtctaaatatctaaaatataggtgttcaggccaggtgcagtggttcataccagtaatcccaccactttggtaggctaaagcaggaggaacacttgaggtcaagagtttgagagcagcctggacaacatagtgagaccctgtctctacaaaaaaagggagaaattttaaatagaattttwaaaaaagaaaaaaatataggtgtttaaaagcaagggtrtaagttgagggcacagctaaagcttttacttgagatttggaaagtgattttaggtattttttaagggctttattaaaaaagttagatctttcagatcaagccccgtgactttctttgtcttcrgctcagagctgatcttacatatgtcacctacaatttgggttctttagccaggcgtgrtgatgtgtgcctatagtcccagctactcgggaagctgaggtaagaggaccgcctgagcccaggagttttgggctgtagtgggctgtgctaaccaggtatctgcacgaagtttggcagcaacatggtgaccttctaggagtggggaaccaccagcttgctaaggaggggtgaaccgacccaagtaggaaagggagcaggtcaaaactcccatgccaatgagtaatgggattgtgcctatgaatattcactgcactgcagcctggcaacgtaataagacctcgtctctaaataataatgataataatttgtgttcttaaccaacagagaaagggtgtttatagtactgttattcatggtgcaacagcatttcctggcacacaaatcaaacctctcctgtttgcctttggagtgctgtggcctttggcgagaagccaggtctgcccacagccccaggctctgtcctttctgcctgtgcaaggtgggagccggatattagagaagacttggccaggggctctgagcagagagctgtgctgggaaccctcaggacccctatccactccagcttcctaagatgtgttagctgcatacctctgggtgagaaaacgggcagaggaagagtgactttccgaagggtgatgcraaccaccagctcttacagaggggagatgccggatcacggcctctgggtgtgagaattgaggagatgtggtgtagagttgagaagtaagaatatccctgacagtttttcatccccacctcttgattctgagaagaatacccactcaaaaatatctgatgagaagatgtggagaggccgagtgcggtgacttacacctgtaatcccagcactttgggaggctgagacgggcagatcacttgaggtcaggagtttgagaccagcctggccaacgtggtgaaatcccttctctactaaaaatacaaaaattagccaggcatggcagcgcatgcctgtagtcccagctactcgggaggctcagacaggagaattgcttgaacctgggaggcggaggttgcagtgagctgagattgctccattgcactctagcctgggcaacagagcaagactctgtctcaaaaaaaaaaaaaaagaagaaaagacaagctgtggtgacaccttgtatagcttcttcagtatgtgatgttcctgtgccttctgattagtgctcagcgtggttctctgtgttagttccatgaccttctacttttatgtgtttccagtaatttgaatagataaccaggattattattaattggtatgtggtatttggaaatgctgtatctgttcctgaaacttacatgttgatgacgtactcacctcagaatttctctagaaaatgcatagggcttattgagagggttgctcagtggtgtcaccttctttgtccacttgcagctgaaacattaacaaacgtgctggatttcaaaagggatgctggtctgtggcatggcgtgttaacagtgagtgttgtttgctgatgactaactgttggaacaagggattgagatgaacccaagcctctgcctgaaatgttgttgggagagtacatcggttttgttttgctttttctggtgtggctcgggcccactcrccctaagcatgtgtgctcccccacagagcgtcatgaacaggatgcacgtggtcagcgtcccctacgcgctgatgaaggcgaacccactctcctggatccagaaagtgtgcttctataaaggtaacggataccatggtcagggccttcacccttctttagggaaatctctttgaactgacctttggtgcttaagaaaaaataaagctgacatgtggaactgcagatgtaggctgaagagctgtgggacgtctttcttggtcacacccctgcccaggaatatgggggctttctctgcctctggcatggccctcagggtttcgtgggtgatgtggtaagtagggccacttggtggggtctgggccttacttctctcaacggttgaggtgcctcctgggaccaagcaggaggccccagcatggccacacctgcacagtyggcagtctgtgtctctgccctgtggagctcagtggcacttctaccagccactgaggcactggatcacctgggtcacccatgttgccttgttctacctactgggctgtgcccctctagacatgtctcagagcagtgtggaggggcagctctctctgtctgtcctactttatggagggaaactgaagcttgggtaggggtggggggattgctggattccacatgctagccagtgcaggggccagactgaggcctgagaccatctgtttagcttctggggtcctcacacttctcagccagcaccaggggtttggggaaggacaacatgagatgaagcgggcagataggaaaagagcaatatggagcttctaagaaaaaattaatgttggaaatggatctgaggttttgatgtctaaattgtacctcagagttgatttttgtggaaaaagctttgagggttygttagactgcatgtgagagacggctgcagagagcttgtgacctgggagctaagtgttgtgtctgtctgtgcatgtacacctctctgtgggatgaggtacacgtgtctgtaggcgtgtgagggtgccagtccttgtgacgcagggatgtctgtgccatcctctctctgcagctcgggccgcgctggtgaagtcgcgagacatgcactggtctctcctagctcagcggggccagagggacgtcagcctcagctcactgcgcatgctgattgtggccgatggtgccaacccgtgtgagtgagcctgtgtgccyggcgcataccccacacagtgtcccctcctgcaaamcaaagtagaatacactgagaagcaaaatggaggcattttcactgccattgtcatatagatacacatgtcccatcgtttctatgacayggaacatcttggtgattcactggtttatcccatgcatgtttattaggccactaaatttaaaagcaattttaatatgcttgatgaaaggtacatgccttaatgagagtcatctttcttaagaaattaccagattgtgctgtggcctggggttcctgtttctctttaggcctcatccccaccctcctgccctttgtcctggtgcccccacgtctctggcttctggcttcacttctcccaccaggacccaaccattctccctcctggtttgcctgggtgtcccccacatcctcccaggaggagctccctrtggctgctgcctgaccacgtagggcctcctgcgtacggtggtctgaatgggaactgctttgtcaaggctgcacacgtgagctctggggcccaggactgtccagggtctgactcagtacctcctctggggaagcctcaggtgatgctggtcacacaggggctcctgttgcagcacacacctgttgaccaggtattaggggttttcttgtttgttaacctgcatcattgtctatgcactggagactaccctgcatcagaagctgatgtttcatcttatcccctctccagtgtggccgacaccccatctcttgggaggtcaccccacctttgagcacccccagagcctctcattctcttggtccacacctgagccaggcagggcctgcttctgggttctgcagcactgctcaggtctctgcgtctccaccccaggcgcaccgccactccgtggtccccatggtggagtcagagtgtgcacctcctctccagtgcctcttcccatggcactcccctgttgctgcacctgatccttgcagtgccgtgcagcttgtctcccaccacatgcagcaccttcctgtccctagtgatgccccttctgccctttggagcaccagaccatccatggctgtctgatttcctttaaagataccatcttccttgaagaacatgaagtctgagggtacctgtgaaggggccccttccttctgctgatgcagccctgtggttccratggcygcaggctgcgctaacttgagcatgtccagccaccccttccctgctggccccccagttagtgctggcgttccactcttgttgctctgtgcagggtcgatctcctcctgtgacgccttcctcaacgtcttccagtccagaggtctgaggccagaggtcatctgtccttgtgcaagttctcctgaggcgctgactgtcgccatccgcaggtaaccttattccttgctatgtctcatgagcacttagttgaatcttctgcatacagctgagttatcctggagctgtgcctgtgcctgttaggatccaggcccatttgtgcagtagtaccttggtgcctggccccccacattttgccggcttgggtttgtgtggagaattgggtaggaacttcctgggccatactctggattcttgcagaatgccggcttgcgattttcctgagtgcttcccaaattagaaaggccttgtcatctcgtctgtagctgtggtaaacattacaacctaggaactctttcttactctgaggcaggtgtcggtcagccgtggagtctgtgggaaccactgacctgcctggagaagcacccggcctggtgcttagtgcccggccacccacctcccgggaggcctgtgctgctcctgtggcggtttccctcatgtcatgtttctcagcctagagggcatgttgagcctgcagactgccctgagtgtccttgtgtgtgggtgcggggctgctggtccttcctgtgctcctcactcccctcctgaggtttcctttcccctcttctcacctgccccactcccagctccatcctgtgggtagaactcagtgtgctcacagctgaggtgtcttagcctcaattgtaatcttgtattatagtcatatattcataaatggtatgtgtttccatatatggaactaaccctaagtttttaaaagtaaccctaacttggctgggcacggtggctcatgcctgtaatcccagcactttgggaggccgaggcaggtggatcaccttaggttaggagttcgagaccggcctggccaacatagtgaaaccccatctctactgaaaatacaaaaaattagccaggcgtggtggcaggtgcctatagtcccagctactcgggaggctgaggcaggcgaatcgcttgaacccaggaggtggaggttgcaatgagccaagatcatgccattgcactccagcctgggcaacaagagtgaaactctgtgtcaaaaaaaaaaaaaaaaaaaagttaccctatttaatcacttaacattaaaaaaacgctattgtcgtctacaaactataaattattcttcattcttttgttctatggtgatttgttttgcacaactgtgtaatttttttcrtattggaggaaacgcctgttgctcagtattccagttactattgttgtatcacaaacaacaacagtcattttattgtctctcatgctttctgtgggccaggagcttaggaaggcctctgccaggtggttctggcttgcaggagatggtgtttggagggagcggtgaggggctgagacagctttgtgtgtgtacatctcaggcccccacctggtctctcagagtgagctgctctgggcttccttgcagtgcagtggcctcaacaccgtccttctgtttgccgggcttcacagggctccaggcgagtgtcccaagacaatcrggtagaagctgaattgacgttactggcctgcattggaagtcacacagcatcacaaccactgtagtcacaggcccttttcccactgagtggagtgtcgacgtcacattgcagaggggcatgtagtttggagacattgcagcatctttagaacatgcgtttctcacaagtctgtaacatggagcagtggctttggtgcagaatcatgctgcaggcaaggtgggcccacctccctggaatttcatcccccycgtcagttaaacccatggtggttttattttctaggccacctgatctgggaggaccacctccaagaaaagcagtcctrtcgatgaacggtctaagttatggtgttatcagagtggatactgaagaaaagttgtcagtccttactgttcaggacgttggtcaggtgatgcctggaggtaagagacataaccagagtgggtctttgtccatgactgattgaggtaacgaaaagggttttgttttgttttgagacggagtcttgctttgtcaccaggctggagtgcagtggtgtgatcttggctcactgcatcctccgcctcccaggttcaagcgattctcctgcctcagcctcttataaatactccaggcttcatagtagtgctctagaagcaagcatacaagtaaaagatttctcaagaatgtttttcagtgtaaattggaattttactttgtaaaatatttgctcagttttttccctccctttgtgctaagtttaaagatgagctaaaatataaagatgtgtatatggcctatgcaactcacttacagttctktgatatttgggaagacggtgataatagctcactgtgttccaggcacaggcttcatacttcatatgtgttgaagcatttaaccccatggcaaccatgtgaagtgggcagctctgaggaaaatggtaatgtttgtgaataacttgataattaggttatctaagtaagttcyagcaagcatgtgttagatagaagcctcatggaagcttcccagaaattcctcgatgtcagaaaggcctatgtgaactcttctgcagaagttggctctgtaggcctgaccgtcatgttagatgttggaggttttccttgctggcctgaggcagaatctggcctgggaggccctggtgacattcgagtggggacactgccacgtggtctgaggctgccctccttgtagccaccccacagctacttcagctttcctgcctccctgtgatggcccttctggggttcacgggcagctgtcagggccccttttggtgacttctagaggcaggaccccatctstcagtgcagtctccccccttccaatgcggccctgactgtgttaggggttgcaggcactgcgagaggctcagcgtcctggcccttgtgcctgcaactctgcctcttgcaggcggctgtgctraccggctgtggctgctcaggtgcasaccctgtctgtgggtggtgctggcagcccagccatctctaacctggagcctggggccagctggtgcctgatccctgtgtgtgcacagatgctgggtcctcattgaataagactgaagtatttcagcctgtgtttctagctctacttgttactcatacaaatggcatcatttttttcctgtaattctactgagaaatagaacagtcagtcttgcacggtgcttgaacctgtcgtaaaataattctcctgagaaatagaacagtcagtcttgcacggtgcttgaacctgtcgtaaaacattttcacagacagcartcattggggtgtcacttatttactcatggggaaaatacaggtaagtgtttaaacttccctggaaaatcatgatgaggtcatgattctgaatgaatcttaggaacatctgtagttgtgcgcgttttatttgtaaaatgtggattaggacaggacatgcgtgcacagcgctcccgtaggcgtgcacgcagcacacctcctcccccgggcgtgcacacagcgctccaccagacgtgcatgcagcgcacccccctcccccaggtgtgtgcatgcagcgctccccctctgccaggcgcgcgtgcaaagcgctcccccaggcactcccccaggtggacccctgtttcccatgaccctccacagcccccgggctgtaccccttgttgtgggactgagccccatggtgaatcctacgggtgatttgtttgcagcagtttttcagtctgccctgtgtaggcctgtgttcactactgtatcaagtgtgtatgtggtgctttgtggcttttcrtgaccttgccccatctctgcatgtgcttgtaagtgttgtgtggcactgatggctgcctggatggccacctggaagcacagacaagcaccaccttccacatcagccaagcaccaccttccacatcagccaagcatggctgcattctctctgcaaagtcttttatctgatttgtggcaaaaggaagcaaatatctggttgtctctctctttctttttactgtctttggagatgagaatatattagaaaaaaactcaagaagaggcacagaaggacagttcctagctgacccaatgggttaattgattgctaagtaaccaagtttcatttaatggaccacagcccattcatttgtgcatctcatgcttttgtgtgaggctgtttctggaggcctttctgtggcagagctgaggactaggcagatgagatcccttgtgggaggcgaaggcagcaggtcaccgagagttgggtagggtgcacttaagtaaaaacagaactgggtgatggggctgtgggaggagtcacactgaggcctgagacatcgtgctccatgaaaaggcgcacatgtacaaattggcccccaaatgcggaaaggccgagaaattgaagarcgaggcagacaggtcgtttgtcagtagagggtggttcattggggaacttacagatagaatcctggtcttgagtggctgcaagacaggtagatctctgcaccgcaaccctccagacccagggcctttgtcttggggaaaaacatctgcgctctggaaagaatgtgcacatggctgagggagtgccctgggcctcatagcctgtagtgtgtgcagcagcatcaaggttgttttggaagttaggcagaacttaaaatgaacaggtatttctccatgaagatatcctagaggcactccttgacttaagattagtctggagtcacatggcagatttgcatttaaaataaggttactagaaagggggcaggcatgggcagagttctgtcmggctctggagcaggagatggtgtccygggctcgtgtgtggtggtgatggtcaggagccagggccagcagcaccccatgtggacccgagagggcagtatgacaagaggaggcacagggtttatttatcgtagtacaggaaatattttgtcagccggggcttattacatgaaggatgtgttgtactttctggtcaccttacattgattataaaaaatattacatataaaatataaagacttacagctaggtagcatgtgtatcatctgtgtcataaaactccttataagaaggtgctgtgtatataacatcctgtttccataaccgcacatacagcagcaaggagatctttgtgagtgatccatttaaacacgttcttgataattttgagttttttttctcattttagctaatgtatgtgttgtgaagttagaaggtaccccttatctttgtaaaactgatgaagtgggagaaatatgcgtcagttccagtgcaactggcacagcgtactatggattgcttggaatcacgaagaatgtgtttgaggtttgtcccttttcctgaytttcatgttgaagttaagttgcatgagcactcatggggtcccaggtgtgctgggtgctgggggattgcagaggctgcggggatggtctccttccacacaggcgctgctggggctgttggcacatggcctgcacacccctgtgtgtcctcccagagtgagggcaaggccagtaccaggaccaggcatgctgtggagggctgggagtcagcgtgcttcccacagtcctgcatgggaggagggtgtgtgggtgcggcctggtggccaataggaaggcactcaccgtggccccagggaaaccagccctctgctatatttgcattgttgtgatgtgagttgttcaggacaagtctagggaggccaggcacccagagcagaggtaaaagggatgcttgtttcctgcctcaggaggcctgcccaggagattgagcagccaggccacagaaactgggcctatgcagggccagcctcctttttccccctggccagcaggcgcacacgtggtgctgagcctcctgccgcctgctgggtctttttggccagttggttggttgtccacagcctgatcgtgcccctctccactttgtgcaggcagttccggtcaccacaggaggagcacccatctttgacaggccattyaccaggacaggcctgctgggcttcatygggcctgtgagtatgtcctcctgtaccagcactggcagtcagagaaggtagggggtgtggctaagggacacctcgttgcagccccacccttgtcctggccgttcctgacctcccatgtggccttggtcggtggcgctgacctccctgsccatcaccctacctgtgtgcagggccatccacacctccgagactggtgcacagtcctgcacacaggcctgagtcgggggtccccggggtggatgaggatgttttgctttttatatggagtggcaggtttgtgagtattcattatatcattctttaccattttggatgtctaaactattcaaaaataaatgcttctatttgtaacatcttggcccagtgtttctctcaactgggcaattttgccccttccctcccaggggacttctggcaacttttgaagacatttttgcttgtcacaactcaagggaggggagtgctcctggcatctagtgagtacctagaggccagagatgctgctcagtgtccaacmtaagcacaggacagcacctgcgatggtattgtcagcccagaaggtccctggtgccgggtttgggacccctgcccttagctcagcagttttcagtccttcacaaactccacccacaactygtttcccacttgtgagcctttcccatgctgacgctgccccagcagccccactttctttcacatagcctgcccctttcccatgttgcctcccttcctgatgctgccccaccagcccccattcctyccacacagcctgcccctgttccaggcctagcttgtcacagggcctgcgttgcagattgggtctgtggggcattgacccgtttgcaaggcgctagaggctcctgtgctgttggccccttcttggggggcctgaccrtggtcctggcgcatccagcttctgcccrtgtgggtggagtcttgacscacaccctttccctcaggacaacctggtcttcatcgtgggcaaactggacgggctgatggtcactggagttcgcagacacaatgcagatgacgttgtggccaccgcactggccgtggagcccatgaagtttgtctacagaggcaggtgatgcgctgcggacccccaygccgggagtagattccttcatttgcagctcgggaagtctttgtgcagtagatggaaagcccagcaaacttgaattcacaaagcctaaaaattgttgtacatcagaaaactcctaaagtaaaaggaaaatatttgcagcaatgataccagagttaatatccttactgtccaaagagttccttggattccttaagaaaataaggttttgatgtaaaatttggggcaaaggctcaaggggacaaatcagggagggaagaattgagtaaagcaaaggagaaatgggtctaagttcctaataaccttggaatgtgaattaaaacagaaaagtgccattttctctgcgagacacatgacaccctccattgcctctggaataaaaatcaactcaacttttctacatgtgtaaagcaaggaccttagagattctcttgagcaaataatagacctctgggcctatgcccctgggcacaggggccaggaagagaattttgcttcttctaytcccaagctccttgtctgggaggaagctcttcccctaactggtccactcaaccagctgcctttttaaattttatttttctcaagggggtgccttttttttttttttttttttttttttaaagatagggtctcactctgttgcccatccaggctggagtgcagtagtgtgaccataactcactggagcctctacctcctgggcttcaagcagtcctcttaccgcacctcctgagcagctgggaccacagacatgcaccccacgcctggctaattttttaatttttttgtagagatagggtctcactatgttgctcaagctgctctcgaactcctgggctcaagcaatcctccctccttggcctcccaaactgctgggattacaggtgtcagccaatgtgcctggccaaggatgtgccttttgttactcaaactaaggtacttgggagccaggtcagaccctgcctttgagtagcccttaaagcaatcgtgaggggattctgcaaagtggtgtgtcatcatggttagtcttgaggaaaaagcccagaggatggacaacagagaaggtgggagattgctcagggggctgggaagggcaggctgtgctcatgcatgtgtgcgtgtgtgtgtgtgtgtgtgtgtgtgtgtttgtgtgcgcctgcgtgcagggggagggtggcacagccagggtcatgacccccctcacagcagaaatgggggacacattgggcaggtgtccttagggataacatcaaggtagcccaaaccctgctttgaggtggagcagggagaccaccccctcgcagggccacctgtacctgatggtgacggcatctgcaggcaggatagcctccctgtccccactagggaagagctgaggaatacaggagcttggaagtggaaccacaaccaattgagagtatatgtgccattggaagaagagcaatagaagatttgcaacatgaactaagatcaagaaatgctaacaaagtaattgttcaaagaacacagtagatggaatacataaaatggatacagctagagaacaagtagagaaggtggaaagtcagattagggaactactctggaagtaaaataggaactttaaaggaactattaagagagatgggagagaataagggctggtgtccagatagcagactcaaggagaagggatatgtttagtggtggttagggattgtctgaggaagcaggtggttggggttctctggactgggaagtggtccacagagggccccatggcatgttgagcttatctgtattctcaccatggaccacacaaaagccaagcaaaacacatcagacttccccacagtggaactggcacaagataacagtgcacccaatttatccaaattgtcactttattgtgcagttgtaataaaaaatatttttaagcatgtaagtttcagaagttttaacacacagaggtccgtactgaaaacagttttggtcaagatactaagagaaataaattcaagatgtgctataagatgtatgagagtaaggagaactcagtactaggtgaggtctgttgtgtaaattgtgtgtgtgtgtgtgtacacacacaccagtcaagtcaaaggaaaggacaagagacggtatatccataatgtcccagagtcagaatggtagacatcctaacatgatgggtttggtggggagaccatcttcttactttatgaaagaaaagacaaagatatcaactcaaagtctaaaagaaggaaaaggcaacacagaaaaaaggaggacatgttgaaatttttaagatagtaaaaacacgtctaaatatactaatcactataaatgtcaatagactaactctagtaaaatagagatgcgatctgttggattaaaaaaatataataaatagaacttttagacaaagatttgtgcagaaggaaatttacatcagattaaggaattttttcttgtaaaaatgtgtgtctttggagctgttttgctttgtcctgaagtcctctgttttttgtgacttgagacacatttcaaccatcctcgaggagattagaatgatgagttactttttgaatgtgcagcaggtagccccatttgatagactgcattttaaatactaggacagtctgcctcttccatcgtgagggtgagaatgcatctgtgtcttgtttggcctcttgcygtgtggccatttccatgtctcatcccgcaggatcgctgtgttctctgtgaccgtgctgcacgacgaccggattgtcctggtggctgagcagcggccggatgcctcggaggaggacagcttccagtggatgagccgtgtgytgcaggtgggcgccccggcacggcctatggttcggtgaatctcccaagctggcacccccactccactccaagtgccaagtggttggcttgtcccgcccggtcctccctggctccagctttgtttatctgtatttttcattgcaaattgacaaattacagctgtatgtatttacgggatacaaagtgatgttataatttatgaatacaatatagaataattaatatatccatcacctcaatatttatttttttctgatgagaacatttgaaatgcactctcacagtgattttgaaatgtacattattatattcaccagtctgtgcaatatatctcaaagaaaaaactttcctcctcctgtctaattgaggctttgtgccctttcaccatcatctcctcattgccccatccctcagcctctgrtcacagatttgtggacatgtgtacacaaatacagtgtgtgtgtttcccctttctgagttaaatggtagaaaactgcacacacttctcttcatcttgtttcctcatttaacaaagtgtccagagggcattccatttcctggcctggggaacaggtccacagaggggatgttcctgtcccccacccagcatctccccagcctcaagttgggggcctgtgccaaacagggtccttccctttcaggccattgatagcatccaccaggtgggcgtgtactgtctggccctggttcctgccaacaccttgcccaaggctcctctcggagggattcacatttctgaaaccaaacagcgctttctggaagggacrctgcacccgtgtaatgtgctgatgtgccctcacacctgtgttaccaacctccccaaacctcgtcagaaacaaccaggttagttgaacctaacaacaggatgctctctagtctaasagtggtaacagcggtgcttgtggttagggtgcggccctgctagacctccagtgccaactgcccacgtctttggggctggggtcaagagccagagcgagtgtgcaccccagaatggtgccacctcccgccttcctggaaccagccacgcatgggggaacttaaccacatcacctgcatggtggtttccacctgcctgttaggaaccaattttaatgataaactcaaggatggcatctyagctttgcatggctaggagatggctccctagggctagaaatgctgcccaggatcatcctggagctggacgagctggacacatcacatcacccagtgtctgtgtggcctcggaaatctctcagcaaacggccaacttgccttccctcattttatacatttaaaagctaattttagagactggtttaactttaatgcaatttttcatttctttggtcctgttgatttttagtacatgccaaagtttttttttattaattattgaacacatatcactaaatacatttcatcaggaagatttaatttcctgatttatacataaagtacagtaaaacaaaatatgttaagaattttgctgtgactgaggccaaatcgtatcctctgagatgcgtcgtgtagtaaacttctcaataaggcgtagtttatgttcaagagagaaattctctttgtcacttagcataaaccttgtagctagctttctgaatatttgtatctcagtagaagagttaaatgcctcattcaagtatgttttcaaaataaaaattgtaaataaaatcacgtgatgtttatatatgagaagtcaccagcttttcattcagagttcccccrtttctagaggttggaccagcctcaatgatcgtggggaacctggttgctgggaagagaatcgctcaggcttccgggagagagctcgcccacctggaggacagcgaccaggcacrgaaggtgacaggccagttccggggacgggtggacgggtgtctgtgccccggaggcgccagtgagcaagtcgccctctcgtgcagttcctgttcctggctgacgtgctgcagtggcgtgcccacaccactcctgaccacccgctgttcttrctgctgaacgccaaggtgaggcagtgtcacgcccacggggcttggaaacacctgtgggccggtggagccctttgcttgtctagttcatggtgccagtgtcctggttgttctcatgtttagagaacagggtgcctgtggactcagcccccgtcctggttgttctcatgcgtagagagcagggtgcctgtggactcagcccccttgtctggtgcggttctcgctgcctgccctttcctttcttgttttccacacatttcacacaatagtatttctattgattttgtgtttagcaggaaaatttttatcagctcaagtttttaaaattaaaaacagtatacatgtaaatattcctaagtttgtgagctaaaaggaaatgtttattttgtaaaaaattagccatttagaatttctacatttggttacagcttttaaatgacaaatgttgcttcctgccctgctcctgctgctgatttggaaattctcatgtgtttcaagttcctgttgtgtgcattccactgtgctaggaacattcaggatgtcaagaaggagaagctgtaatcttcatattcaggttgtgggcaggaatgcgaaatgcggaaacacagaaagttaaataacttaaaaccctgcaaggcttcctgtcccacgcaccatacaagctgtaagaactcttaagctttggtgtcgtaaagagtaggtcactgtggcttagaatatgctcttctagctcttggtgctgctcattcgaattaaaaaaatacttaatgatgcctacaatgtgcacagtgcacagtaataagattaaaaggacccctactctcaggaggcttaaaatcagtctttcctgctagaaaacaagttccgtaggagagagactttgtttttctggtgtattggaagcatctagaaccatgcccagtaaacatttattttatgattgattgagttctaaagcctacaaaccagccagtgatttatcattgaccaaggtaaaatcagcttatggtgtgaacctcagtatcaatacagtggagtgatgtaacctggagtgctggggagggggctttgaatggaactgggtagcaggggctatgaagaatgatgcccagtggctcaaggcaggaaaggaggccagtgtggtgggggccaggtggtcccaggtaggggatgcagataaggctgggggtcgctgggttttccctaaggatgcagtgggatcccagaccttgcgggctttgagtcccagtccagatctcaggttctgtcctgatggggccctgactcatatggactggcaaagcttccgggatttggaatctcaggatctgcccagcccttgtgcctggacacagcacataagtgcgtccactggtctctctcttccactgccttctgtcagtagaagccaccaatcgagaaacagggagttttgatgttacactggtctgctctggagttttatatttattagactgaattgcactttttatcttcttaagaaggactaaaaaagctgcgaggcctggcaggggatcagggaggatgagtgtcctgagcagagaggtagggttaccaggtatttctgtttgccttgaactggtcacatagccccagtgcccctcagcagagagacagggtgaatgaaggagctggtgtagtcagtcctagaggagacacacagatgcctctgagaaagccggttgcagatgacacacgcccaggctcagtgcaggtgacctgtgggcatggaaagtagtacaattcagggatgtttgcttatcgcttattatgtatttataatggtgtcrtatggaatattttattgaaaaggccagaaaggtcttctttacccacgtgtttctggctctgccctgggtgaatggagtgcccgcatctctccctcttagctgggaycacacaggagatacttgcatgcctgtcccttcactgctagtgagagagtacagatggtgagaaaagacaccagtcgtggaccatgtgcggtggcttatgcctrtaatcccagcactttgagaggctgaggcgggcagatcacttgaggtcaggagttcgagaccagcctggccaacatggtgaaaccccatctctaccaaaaaaaagacaccagccgtacgtctaggactgacacattgtcattatcatggacgctaatcacaaggtgtcgtgtgcagtggcgtgcaggtggtgtgcacgcagatctgcgaacagcccacctgcacgcaccagcatacagatgagctcaaagatcgctttcctagggcaccgtcacaagcactgcaacctgtgtccagctgcacaaaagggctgagagagtggccgcggctctgatggagaagggaagactgagtgttggggaccatgtggctctggtctacccaccaggtgggctcactgtggggctgtccacctgcagctctttgtaagcagcctcctatcctaagcagccccctagacactccctccccgaagcatcttccaaaactaagctcagcccctcctctctgcatgtgtctgcctcctcagctcagctacccctgtggaaacccaggagtcacccatgccccsccagcacsacctcccctcctctctcgcaggaacagtgaacagaggctggtgggagcctcttgcggccggcctcctcacagccagtccttgtctccacaggggtggacctcattgccgcgttctatggctgcttgtactgtggctgcgtgcctgtcaccgtgcggcccccgcaccctcagaacctcggcaccacrctgcccaccgtcaagatgatcgtggaggtgcgcctacctggcccgcgggtcagagtctgtgagtgggaggctgcaaggctgccctccgctgcccccttttctgggcagcttgagaggccccgcccacccacccttggcccctcgccatgcaggtcagcaagtctgcatgcgtcctcaccacgcaggctgtcacacggctgctcaggtccaaggaggctgctgctgccgtggacatcaggacctggcccaccatcctagacacaggtgcgtgtcctcgcactgcccaggaccagtcccttttcctttctttgttgtaggtgtggtgtggcctggctgccgtccaaaaacacacgtgaggcaagagcagtcctggcaggagcctggctgacagcagggggtgccccgggccctggtggggagtaggggtccctgtcccatgtgtaaacccacgctccactcagcccacagcagccgcacccagtcccaagtggtgtggagcacagccttgcccctctcacccgcctcctactggcatgggggctggcagctctctgaggctttctgcaaacgctttgaggacacagctcccaccgcatgccgccactccagcatccctgtccccatcattggtgaatgctgtcatgccccatgaaatgctgagggccaacagggtgagggtcagaaacccccctggctcccctctgccgtggacctgtctcagcctgggctggatggggctgggccagggcagctggtgtaggggagggcaggctcagagccaaacagctggccagggccccaaagcctcacgggcttgcctcaaggggagcggtgcctgccctgctgagcctgtgtccagttgcacccagggaggcagtggtgtctggctcatggggccacgagaacttgatgaagcacgcagaacccagagcccgtccacagctattcttgctgtggtcgggactcggctcatctgggctttgccataggctctgtgacttttggcaaatccctagtcctctaatctttcctactggtcagtgacgtgatgcctcccctcttcgccctgcctcgtcccccatccccacaggctcagtgtggtcttggtgggaccgggtagcgtttccatgaagaatgaaatacgctttcctgagcacgcacagcctgcatcgtcacggccccactcccgtctgagctcactctctgcaggactcccaaggacaaatcatgtgtcgcctcttgcctgtgaaagcccagagcgttcagaatacatgtgggaacactaatgttgctggtgtctcctgtttaacagatgacatcccaaaaaagaagatagcaagcgttttcaggcccccctcccccgatgtcctcgcatacttggacttcagcgtgtcaaccactgggatattagcgggagtgaaggtaggtcctctgaaatcttgtttgcttcagcccctagaaatcaggaggagtggacagaaaggatgtcagatgcagatttaaactgacaggtccttcttatgcaaagcacaaagcaacaattttgcttcttaagatttgtgttaaataccaataaatgctaagatgtgattagcctgagagtaatgcgttttctgatgcmttatggttatgtctaaactttctgatttatgactgtctagcttacaggaactggtggctttgaagaatctcttaccttgctgggagtcaatagctcaattaaaatttttcaggcggggcgtggtggctcacgcctgtaatcccagcacttcgggaggccgaggcgggtggatcacaagatcaagagatggagaccatcctggccaacgtggtgaaaccccgtctctactaaaaatacaaaaaattagctgggcatggtggcaggtgcctctaatcccagatactcaggaggctgaggcaggagaattgcttgaacccgggaggcagaggttgcagtgagccgagattgtgccattgcactccagcctgggcgacagagcaagactctgcctcaaaaaaaaaaaaaagaaaaaaattttaaaaattcattaccctgaaattttgtttcaaagatttttagtgtaccatttcttgggtattatttasgttatatggggatttgagccaaccgtcttttaaggaaataaatatgatgtttggtagttcggagctatggtctagccatgtgaacagcggacactgccatccaccctctcccctcctgaatttcatttcactttttttttttgaactttattttactcttaagatgtcgcacgcggccacaagcgccttatgccgctccataaagctgcagtgtgagctgtacccctcgcggcagatcgccatctgcctcgacccctactgtggccttggttttgccctgtggtgtctgtgcaggtgagtgcagggcccctgctgcctgccaggtgggagcagctcgtgtggctcttaggaaccttggccttctaaggcaccttttctgggtgctcaggaagccgatgagatgtgtgtgagtgggtttgtttggggatgaagtgggttggagtctgagtctgaaattgagtgaaaatacatttttcattaaatacactgtccgttatcagtacttgggaagaatctgcttgattccttcaaacactagaaagtggcgatccgtctctagaagtgaatgcctctggagtggtgtccccggatcctctccaagtgttcggagcagagctcagaaccccgtgcctgccatcccccaaccttcaccctgtggcatgttttccaccaaacccccccacttggcgtcagaacagaaatcatgcccctgttgtggctggaaaagaagtgttcttgaggaagggaagagtggagtgcccagggtgctgggtgggcgggcggagcctcacgagccttccctctcgcagtgtctactcgggacaccaatcagtgctggtgcccccgctggagctggagagcaacgtgtccctgtggctgtcggccgtcagccagtacaaggcccgcgtcaccttctgctcctactctgtgatggagatgtgcaccaagggcctaggcgcacagacgggtgtcctcagggtgagtgcccagacccgggcttctgagtgtgctgcagaccacagccctgggaagtttaaaaacaacaaaacaaaacaagactcccaaggcccctccctgcagttggaggaagtagagaaaaccctttcccactaggggccctatgtacacatctgtcctcccacggcccacctgtctctgcagctccacaccccgcaggagaggagggtggggggtagggcagggtccctgcgagatagcggggtggaagtctggccgcgtgggagggcaggtgtgggatgcaggtcagatgggaatcgtttagcgcatccacacgtaggattctgtggaacagacacagcctgcggagaggaggttggtgtccagctccacctctgtgtgcccacccggagatttcccaaaacagtgcccagggccctggcaactcactgagctgtggccgtggcctgaccgctcacccctcccgcagatgaagggggtgaacctgtcatgtgtgcgcacgtgcatggtggtcgccgaggagcggcccaggattgcgctgacccagtccttctccaagctcttcaaggacctgggcctgccggcccgcgccgtaagcaccacgttcgggtgcagggtcaacgtggccatctgcctccaggtgaggtgcctggggctgcggttctcgaaagctggctgttggcagcatggagacccagtttcccagttgttaatgtgccgttttgtagccgcctgatctatttctccttctctgrgcctttgatatctcatttccatgtaacattttagcttcaagggttttatttttaaagatgttctattctagttggagaaaggcttatttggaaaaaaaacacattgtttttgaacagtgactaataactgtaagactctctaagttagatataaaacacagctaagttcttaaagcaagattgaacttactgttttaagatatctagcaatattaaattgaaacattaataaatgtggtaatttgtgttgactcaaattcatttctgaaaccatgaaatgtcttattaaaaggaagcaccaagtttcaggccaggagtggtggctcatgcctataatcccagcactttgggaggctgaggcaggcggattacctgaggtcaggaattcgagaccagcctggacaatatgatgagaccccgtctctactaaaaatacaaaaattagctggctggtggtgcgcgcctgttgtcccggctacttgggaggttgaggcacaagaatcgcttgaacctggcaagaggaggttgcagcgagccaagatctcaccactgcactccagcctgggtgacagagcgagaccctgtctcaaaaaaaaaaaaaaaaaaaaaaaaaaacataggtagcaccaagtttcagagattgaagagctcacggcagttctgtttattgcttcctcagatagctacagctgttgcccagattttgtactagtatctcaatttcatttctttctaaaaacatcttaaaaccaaatggctttttagataaccctacatattgaacgccttattcacccacatagtacaagaatagctggaaggaaatggcacctgtccgtgccagagcagggctgagtgcaggtctgtctctgtttccaaagtgtttgcttggccttgtgcctccccatcacagtggcagtgcacgcagggcagggcgggggctctgctcacaccctcttcaccacaaaaagacccctgaccactcaagcctcagacccttgtcacgcagcagaggagatcgggcgggagccttttgtgagctcgcttcctgtgtaggctgtggctgagcgtgggtgccggcctttgtgttagcggctctgcgtctgcaagcctggggcctccttgctagacgtcggaagggtatggatgccacacatgattgcagaaatgatgttaatgggatgttcacgtttgctctttaagatacagaggtgggttttgctctctctttccctgtgtttctcatgtggctgctgcttctgtgtgtgtttcctgtggctgtctcctccctgtctcactctgctgcctccttggcctctgtcagcccaacaggctgggaaagctggctgagcaggtatgaccttgaccttgaccttgttggtgcctctgtgcttccccctcccatgagttcatgtgactttctcgtgaattctagacaaacatgtttcttttgctgtcttactttgttcacagtggatattacttgacatattacaaaagctcccttgtaaccaaatttaaaagtaaaactattttcaaaaaatgttaatgctcatagcattgccttgggaggaagggctgtgtttagttccagtgcagaggtgtttaattccagtgcagacacaggttatgttgtctgggatctttaagggtgatgttgatcagagtactcatttaattgatgttccttattgaataaaatgacacataatgtcctttagtcgggattaatgttaactgtaagattcagaaaggaagagagtagaaaggtgaaggctgccatccatctcacctgagtgagtctcggctgcgagcagtccccggtagaattaggctggttggtgagaggcaaggccctgcctgacagcatggtggaaatgcccctcaaatcctaatggtgttttcatcacagcaagagaccagtgggaatagaaagttgttagaactgaaatgtaaagtggcatgatttggtgttttcagagtcattgagtgtttcgctcaatattatcaagctctgtggatgtttggatggaaagcatcagactgcctgggggaccttgaacccctaggyggactcactgcagggagcrgagctgctaccttcttgggtgtccccgggggccagggaggagctgccatgcagctgtncctgtagaaacaagatgttaagtgaggcccctgaacagaagttcctctgctgctctccttccagggcacagctggcccggaccccacaaccgtctacgtggacatgcgggcactgcgccatgacaggtaatgctcccagcctgcctgggccccatggatacccagtggcaaagtgatgcaaaccaggtcngcactgactatgcacccccgggacccaggcattagaggacggcggggccaagtcaggcctaccgggacacctggatgggcacatgagaggacagctggctacattgggccatctgcaccaagaggaagaggagagctgtgtgccccactccgkgcgtgcctcccaggggagctcagtgtctatctctstgcgcccgtgtccccagggctgcagttaacatccctttatctgtcacacaaccaggaagaataagagtggcccctgtgacatttggttctttagagggacagggacagagagaagacaagtaacccatctactggcaagaacgtttcttacccgatgacccatgtgacatttggtttttagagggatagggacagatagaagacaagttwtccatctactggcaagaacgtttcttacctgatgctgtcataggatctgacttagtttcatcttgatgaacgatggtggtgcatacagtgtgtgcttgctggtctgtggtcagatgtgtatcagggcccctcccagctttgaagctcagatcccagtcctggattctcaagtatggccacactgtagcttgatgtaaacactaggtttagcttactgggtgccaggggcttgctgggttcagggaggacctaaacgaaatgtagagtgagctgctgtgagcacatggggtgggtggcgagtgcatgcgggtggcggcacttgggaccgcagcgtggttggggtgtccctgccattcatggcaggtgtgctgtggaaaggttgacatcctgactgttgtcaacagaccctcagagtgatcatttccaacgtcatgatctgccctttcagacattactacctgtgtagtaaattttgtactgaaattgttcccttaatttttagggttcgtttggtagaacggggttctccgcacagcctgccattgatggagtctggaaaggtagtggaaaccaagacgcgtgcattctgagtcgcgtctgagacctttgtctgaagcatcaccccgtggagggtgctgggggctgcggctctgatgaacacaggtcgacttctggttggggtgggctcggctgctgcagaagtctccttccctcctttgyggctggtatatagaattacttagttatgtttttaaacacacatctgagctcaaagccaagaaagggagaagttcaggtgcaggaataaagaactcccgctgggtgggtggcaggcctcaggcctctggggccagggccatggaggggggttccggcccacccacacatttagagttaaatggagtggccctggccctaagttggagatggcaaaatctcatgccctagtttagggtgtcagcagggaagaggcccccagaccctgtcggggatctgggggatcctgagatggcccgaggactcccaggaaaaaactgagatgctgcaagaggtcagcagacataggcacagaacagcatcctctgaaccaggaagggttcaaaggaaggaggaaaagccacacagcccaggaaggcagcatgaagagtaagccaggcttgatatgagtcggggaccctggtgccttcacaaccgcagaggcaagrgaaggagcttggccaccctgactccgttcactgccatggccacagccacctgtggggagtcagagaggggtccagagagggacccagccaagccatgtgatgtccaggatacagactcctgcagggcagcaggggtgagactgcggacagaaggcacagctgctgtgagggtctcgaggtgggagctacagggaggccagtgggactgggctgagtgtggggagcagaaggagtgcgtgagtgagtgaactcacatgcaggtgcaggggcttgaaaagctcccttcccrtgtcccctgttacagtcacttcaggcggtagaccagccgagagtggagtcgggtgagcttagtggacagcacatctgtgggagccrtgggctgctgcacgtcctcccttctctgagcacagggacatgtgagccgccatcgcacacagctctgcatcatccttggtgtaaactcagcgggtttccctgggtcatggggcctccacgtcgctcttttccctgccctgccatgtacagccgcactgtaattgtttagctcacccccttttattggacgttctttcctattttgctgttacaatcacttgggcctgataggtttgtgtcctggaaagagctctggttttggggctcagctgggacatgcagggagaagatggaggctccaacagcatctggggaaacagaacagtcccactccgccggggagggtctggyggtaaccgtagctcacacctccctgtggcccgtcgtcccctcctcttgcctgccctgagcctgcagtgtcattgcccccatttcatacgtgaggaaactgaggacacagaacaagcatccaggccttgtgcagtcaggtggtctgacctgagcccagtgagggaacactgggaccgggcctgggaggccaggtaagagatggtggcctcttgccgtcctgaattggcacagagccagtgctcagtggttggactgactcggagtcacgggcaggaagaacttcctcatggtcaggttcctggccaagaactaggacagacatgtgcctcctgcagggctgggcacagcagggtcactgcacccctggatggatgcccatcaggtgcgctggcatcacctggctgattgtctttgtaggcttagtgaccctctgcccctcctgacacccagagangggatcccttctcaggaactggagtcattttgcttatttctattaacatctcttatttctttcaaaattcaaagtcaaatttggagcggcctctaaacttcctgacctgacatnagcacatcagtcctgcaggccancttctgagggacgttattttaatgtcactgaatcaagagagtctcgtgtcatgttttctttaacaagggacatagctctcctccttccagatcctccccggcgtgaaggtcatcatcgcacacaccgagaccaaaggacccttgggagactcacacctgggagaggtgagcaggggcccatgggaggggcttgagcwctccagcctcaccagcttcaccttccttccctttttgcttcagattttggaattctaaacttgcctttgggaatctaccagaaaccatttggcccttsccccgtgtacctcccagacccagttcctatgtaggattttggggtactgtgggacaaactgcctcatccctaggttgacctaaccaagagaggggaacccctaggtttgagggcactgacaggtgagaggagctgcacaggaaccagtggcagtgtggaaaacagctaccttgtgcaggacccagcagctgctacgtaaacgtggtccctggcacccaggcaggagcacagacacggggaactggcaatagggaactctgcaccagaagagttcagggcctccacctgcagctgggaggtttggggagctcagagcccttgtcctgaggacacagtggagggtgcgggtctccctgagaacacagaggctatacaggaatccgttgggttgaaatgtctacatgtattgcacgtacatcttgctgtaatttgggacaggcatgactcattatttacaggcagtggtggcagcttgacgtgcagtcccgaatgtgsagattgatctgttgtcatgggagcataaggactcacgttcctagtcctatcctcttggggaatgtgctgtcaaattgatgtcttcaaaccagrcgggcacaggcatcatttgtgagctctgctgtgaagccagactgggggcttccagcaagccgtgcccagagggaaatcactcagcctcagctggcttctcctgactgggacaagggtgtgagcgtgcgggccctcaggtggtcttaccgtgtcctgatgggaaggtgtcctgggtcccaaccctgagtgtggctggtgtgagggaccctcccctcaacygtcccacttcctgcacrgccaaacccaggtctgtaagtcaagggtgtacccccaagaaatggagagtctgagccaggcrtggtgacccacccttgtggcagatgctcaagggaaacgcccctattggccaccccrttctcctctttcagacgctgccatgcaggggcgtcttagagccagtcgaactgaccstgggttctggacggactctctctagaagggccccatgacacttggtcctgcaggcacaggcctctggtcccttggtctctgcatggatgcacaaaatgcttacgtgtgtagatatgagggtgcacacaaacacgtgracaggtggatacacacacgtgaacacggatagcggacgcacacacacgcgcgtggggctgacgttaaccctgggatgtgccgtctgttttcagggcctctgtcttactgtgagtctgagcagctgcacgctctccactctgtaagaaccctcattccttcagcctgtccctgttgtggaatgtgggttgctcccggccctctcttattaccaacaatagttggatgtgaggaaggtggaattgcccctctcgacttacccacgtaggatagagtcctacagatgacattcttgggtcaaaggaagaaacacagtatttaaggagagaaaagttctgtttgctttctgtgcctgtaatttaacttagttcataaaataagagacaatgaatattatycgccccgacttcgttcagtgttttctggagcattattcttggccagtggatgtctcgtgacagaatctgaactcggtggttggtaacacatcacattcttgtcctctgggcccaccagatctgggtaagcagcccccacaatgccacygggtactacaccgtttacggggaggaggcgcttcatgcygaccacttcagtgcccggctgagttttggagacacacagaccatctgggcaaggaccggctaccttggcttccttcggcgaacagagctcactgatgccagtggaggtgaggggttgtggtgaagccctgcgtgagtgctgtgcggggaggacctgggctccccaagagcttagtcacctgctagcacacctcactccttgctgtggtctggtattgctccttgtggggggaagatgttctgacagcagttttctctgaaaatactgttttccctccatgactgcccctcactgtccttgggccctkggcctctgctgagggcgtgggggacggtgttggtgataaggctaccaggcttctccccgaggccagrccggtctctctgccgctgtgtctttaccagtggcttccccatgcacaacccatttaaggttgtggtcaatgtccagaggactctgtgcagccaccacaagctggccagataaggcagaacttttggtagctcctatagatggtgtcccgttcacagagataagttatttttaataatacgctcacacttgctgtaactttsctgaggtggttccrtgctgcagagataacagcctgctctgccaggacctccatcaccctttctgcacgtggtgtgcgacctcatgatgtttcagttgagacctccctgtgcctgagagcccctggttgggctcagaggatacgaatgtccagactctgcatgccttggctttctgggcacgtgtaaacacacactgttcacagggcggcacgatgcactgtatgtggttgggtctctggatgaaactctggagctcagaggcatgcggtaccaccccatcgacattgagacctctgtcatccgagcacacaggagcatcgctgagtggtaagagcccaggtggagggcggcttcacgtggtccmtccagcccttcctctgggcatgagtgctgtgcatcgkttggagcagagcaaggactgctgggccctgggcacaggcctcctgcattgtcaccctggtctgcagtggagctgggtgccatgtagatgagccctatctaccttgggcattgccagagagggctgaggacttcttgtgggytctccctctggatgtactctgcaaaacatggtgccagagcacacctcactgcctgtgtttgggtttggcttgtttttttatctgtttccttatcagtggtaagctaagagattgtccccaaatgcacaggcaaaatgtagatttccacaggtctcatcctgaagtgtttctacttttaatatgagtttctcacatggttgtgactcctgattccttcacctgtagggaacttgtgttgggacaggtacagctttcagcatcagataatgctctgattctcagtaaaagctttagttggaatagacatcctgtaaaatggatctggcctgatctttagattgtaaatggccttaaayagctgtgtgacattggtgggcttcactcttctttgtgccaccctttcccaagcattcattggcccctgtgacctgtgcctgtatccatgtgacccagtctgtcttctctctgcagtgccgtattcacctggaccaacctgctggtggtggtggtggagctggatgggctagagcaggatgccctggacctggtggccctggtgaccaacgtggtgctggaggagcactacctggtcgtgggagtrgtggtcatcgtggacccaggggtgatccctatcaactctcggggtgagaagcagcgcatgcacctgcgggacggcttcctggctgaccagctggaccccatctatgtcgcctacaacatgtgagcgcagcacacyggcccaggtgccggagatgaatgagccccagcagtccaaggtgtgatgtgggaagacaccgcagagctcactcaccgggactcgcccttcctgtgctcttacagatccctctcaacaatccccgcatctccttttagaaagcacttcctgaattatttaaagaaatattttgaatctgccaagtacatttacaaaaacacggatgctggtattttaacagatggagagacaaggaaaggaaaggaaaggcctggcatgggcattgtgaggaatcacaggcaccgaggttgttctctgctgtactgcaagtttgcactttctttaggctaaaaatatagttcctgatttttaaaattcagttatttattcccacttcaaatgacaagttcatatatagaatttacgggagaaacttgagaccatttacggggagaaayttgattctgggaagatagcagagtacaaaccagctgcctcacttctgtttcacagggaggctgatggaaaaaggaagcaagctggacccatcctccctgctcacagagggcactgtggtcacacacagtgcctcctctgccagttcctttattgaaagaggtgtgctggctggccacggtggcttacacctgtaatcccagcactttgggaggccgaggcgagcagatcacgaggtcaggagaccgagaccatcctggctaacatggtgaaaccctgtctctactaaaaatacaaaaaattagccgggtgtggtggtgggcgcctgtagtcccagctacttgggaggctgaggcaggagaatggtatgaaccagggaggyggagcttgcagtgagccgagatcacgctactgcactccagcctgggtgacagcacgagatgccgtcttaaaaaaacaaaaaagaggtgtgctgcttgtcagcatgtattgtcacggacactcaataagtgccattttggactgtcaaatttagatgctttgtttcagaaagataagccagcatttagttttaaatcactttcctggtttgtaacttgatgctgtttagttaaattgctagttttcctaacactacaatattaattcttctcgtggaagtgtactgatttattatttttattccaagtcagcagatttggaagcattgtggtaaagtctaaggttttcatatccatagtgctgtttggtgagtaccggcagtacagttgaggggagcagggaacagcattgccccgtattgaaggtggagatggttacattcttcactgctttttgcattttgagttgtgtgcctataaaatttggccaaaccattttattattttgttcaaacttgactaagctgagtgatctaaaattatacagaacctaaatcaaagaagagaatgtaaagtcctttagttacttctaagaatttgaagtcaagcacgaatctaagacatagattatttttatatagctaatgaagagtatgttacgaaattgttgggtttttggggtattgagggtggcaaattttgtgaatcatgcatgcttcacagaaacaaccaggtttttccagaattagtctggatcagtgcctaacaaagctgttattaattctccacacatgagtctggctaactgggccagctctcatgttttactcctgtctggctacaaatagcactgtgcatagtagccctgtttccccatggtgttggactgtggtaaagtatgttgtgacatactggaattctaataatcctgttgtaagtatgtacagaatctatgtaacttattgttgacatacagaggtttgggaagtagtctaatggacattccttacaatagaatggctgggaagggaaagaaaaaaaaaaaaaaactacctaactccaatcttaatgttgtagttttatagcaaacaaaaattgtcagctttttgtattgaaaggtcagtggtggtaagacaaggtgtcttgtaaattaagattttaagaagtgcattaaaatgttttagaattactctgggaattctgtatatcacactaaaatttttatatcattatgttaataaaagttattgactttgtaattctgcattttgaaatgtgtgaaaagggtytttaaattaccccgaataggttgtatcttattttgctttttttctgactataaaagcagttatgcttatagcataaaatctagaaagcacattaaagtataaagaaaattaaaatttcttataattctacctctgagtaaacagcagcattcgtatgtaacataaaccctctcagggatttattttttctttttaaaaattttttacaaaattaggatcaagtgcttttttaaataatttgcttttgtacttaataaattatagactttaaaatctattacatatattcttctacatgtttcagtggctgtattttacaagtgtgccatgagtaaatgtagtatttgctgtattgccgtacatcagcgttgtttcaacaggactgcagtgagcccagatgcacgtttacactgccatgattacaattactgccttgggctcagttcttataggtagagtgagtgggtcagagttcatgccaggtgtgaagctttgggtacctgctgcccttcagaagggcaggatgacagcatggaaaaggcctctttgcagatgccaagtaatgttggcaatggacatgtgctcaagattaaaataactctttaacaatttgataggcaaataagtgttgtgtctggtcatgttgaatatgtcctcgtgttcatggccatttttagttcttatctgatgtattttgttcagatttggcagtccttatggtcaagttttttcttactgacatgtaggagtctctttctattaagaattataacctccatatacttcttactttttcttgtgggttatttgtattttggttctatctgttttggtgcagatggttttttagatgttatatttatgcaaactggttattgtgtttgatttcagattatgaatatagctgatttatttcaaagtggttctactggaatgatcagcataaaccaatggggagtacatggcagagaaataactaacctccagtatttgcctggttcctgccacagtgctggccttcatgttggcagttccagaagtggggttgagggagagagagaatacttgaagaaataatggctgaagacttcctaaatttgatgaaagacctgaatataagcatccaagtagctcaacaaattccaagtaagatgaactcaaagagaccacacagataccaacatttcagaagccaaagccagagaattttgaaagcaacaagggagaagcaacttgctacatacaaaggatcctcagtaacaggtccccaagccctgggccacagactgttaacagtctgttaggtaccagaccacacagcaagaggtgagtggtgggtgagtgagcattaccacctgagctctgcctcctgtcagatcagtggtgacattagattttcataggcatgcaagccttcttatgaactaactgcacgtgccagggatcgaggttgcacactccttataagaatctaatgcctgatgatctgaggtgggacagttccattccaaaaccatcgtcctgtgccccctggtctgtggaataattgtcttccacaaaaccagtcgctggtgccaaaaaggttggggactgctgctcaataagattatcagcagattgctcatcagaaactagaggccagaaggtagtgggccaatatattgaaatttaaagtagttttttctaattctgtgaagaaagtcaatggtagcttgatggggatagcattgaatttataaattattttgggcagtatggccattttcacgatattggttcttcctatccatgaacatgggatgtttttccatttgtttgcatcctctcctattcccttgtgcagtggtttgtagttctccttgaagaggtccttcacatcccttgtaagttgtattcctaggtatttcattatcttagtagcaattgtgaatgggagttcactcatcatttggctctctgtttgtctgttattggtgtataagaatgcttgtgatttttgcacattgattttgtatcctgaaactttgccgaagttgcttatcagagtaaggagattttgggctgagatgatggggttttctaaatatacaatcatgtcatctgcaaacagagacaatttgacttcctcttttcctatttgaatatgctttctttctttctcttgcctgtttgccctgaccagaacttccaatactatgttgagtaggagtggtgagaaagagcatccttgtcttgtgccggttttcaaagggaatccttcctagtttttgcccattcagtatgatactggctgtgggtttgtcataaatagctcttattattttgagatatggtccaccaatacctagtttattgacaggttttagcttttaataataaagtttataatgtaaaaaataaaaaatttttagagaaaaaagtttataaagatgtctaaaaatgttttgcacagttgtacaatgtgttttaagctaaatgtttttacaaaatagccaaaaacttaaaaacatttgaaagtttataaagttacagtaagctaaggttaatttattattgaagaaaaattatgtttagtgtagtctaagtgtacaatgtttataaagtctatagtagtgtacagtaatgtcctaggccttcacattcattcaccacttacacccaaaataactttgagttctaccagctccattaatggtaagtacttactatgatttgagtgacccccaatgtggcagtattaagaggtggggcccttaagaggtgattggattaatctattcaaggattgatagattaatggattatcatgggaatggggctgatggctttgtaagaagatgaagacctgagctagcatgctcagcgcccccaccatatgatgccctgcactaccttgggagtctgcagagagtccctaccagcaagaagaccctgacctgatgtggccctcaaccttggacttctcagctgctataattctaagaaataaattcatgtttttcttataatgtagccaatttcaggtgttctgttataagcaacatacaatggactgagtgccctgtacaagtgtactgattttaatcctttatactgtatttttactaccttttctaaatttggacatgtgtttagatatacaaataccagtgcattacaattgcctacagtattttgtacagttacatggtggacaggtttgtaacccaggagcaataggctatatcatatagcctaggtgtgttgtaggctaggtttgtgtagatacatatacactgtatgttgttcccccaatgatgaaatcacctaaaaacacatttctcagaacatatttctgttgttaagtaatgcatggctgtatgcacaaaaggaagtgagaaagggatttaaatgtttcattaaaaaaaaacacagaagggcgcaatacaagaaatgaaagagatataaggcatatagaatatgaagtgacagaagtaagtctctccttattgataattactttatctgtaaatagattaaatggacagagattggcagaatggggaaaaaacaggatctaactgtatgctgtctacaagagactcacatccaaagacacagtattaatatattgagagtgacaggatggaaaaatatattcactgggcacagtggctcatgtctgtaatcccagcgctttgggaggctgaggcaggtggttttcttgagcccaggaatttgagaccagcctaggcaacatgaagagaccacatctctaccaaaaaaatacaaaaattagctgggcattgtggctttctcaggaggctgaggtgggaatattccttgagcctgatgggtggagattgcagtgcaccaagatcacaacactgtactccagcctgggagacagagtaagaccctctctcacaaaaaaaaaaaaaaaaaaaaaaaaaaaaaaaaaaaaaagatattccatgcaaatagtaatcaacagggagcagaggtagctataataatatagtttaaataaaaaatgattacaagaaatgatggacattaataaaagattcaattcagcaagatgtaacaattgtaaacatttacacatacaatgacagatcatcaaaatatatgaaatgaaaactgacaatagaagggagaaaggagaaatagacagttctataataatagttggaaatgtcagtgccctgctttgaataatggatggaacaataagacataagtaaggaaatggaggctttaaacagcacaacaaactaactagatctaacagacatatgcagaacattctacccaacaataaaaatagaatacacattcttctcaagttcacatggaacattttccaggatagacaacatgttaggccacaaattaagtctcaatagatttaaaaatatacaaagtctctccttaaaccaaactgggataaagttaaaaatctatagcagaaggaaaactgagaaaatacagaaattagtgaaaattaacacactttcaaacaaccaatggatcaaagaagaaataacaagaaaaattagaaaatacttggaaataaaaacaatgtaccaaaacttatgggacccagcaaaagcagtgctaaagaagcaatttatagctataaatgcttacattaaaaaccaagaaggacctcaaattaacaaactaacattacaacttaagaaactaaaaaagaagaacaaactaaacccaaagttagcagaagtaaggattagtgcagaaatagatgagagacaatagaaaaacagagaaaatcaagaaagccaaaaatggtttctttgaaaagatcaacaaaattgacattttagctagatggaccaagaaaaaaagaagacagattactaaaatcagaaataaaattggaaacgttaccaattctacagtaataaaaagcattaaaaaatactatgcacaattgtatgccaacaaatggaaaaacctagaatagacaagttcctaaaaacacaaaacatatcaagactaatcatgaagaaatagaaaatctgagtagacttataactagtaaggagattgatttaagtaataaaagatctattgacaaaaacctgatggcttcattggtgaattctaccaaacatttaaataactaacactaatcctttttaaactttttcagaaagttgagggaaaactttcaaacttactctatgaggcaagcattatcctgatactggaaccagtcagacactacaaaaacagaaaactacagaccatgattccttctgaacattgatgtaaaaatcctcaataaaatactagcaaactgacttcagcagcatattaaaaacactatatagcattacaaagtggggtttactcctggaatgtaaggatgattcaatatataaaacaatcaatgtaataaaccatattaatggaatgaaggggaaaaaccacatgtgatcgtctcgattgatgcagcaaaggcatttggcaaaattcagtaccctataatgat

SEQ ID NO: 94565 - DNA, 115125 bp, Homo sapiens
  misc_feature (1)...(115125): n = A,T,C or G
gctgaggcaggagaattgcttgaacccatgaggccgagtttgcagtgagccgagatcacaccactgcactgcagcctgggtgacagagcgaaactccctctcaaaaaaaaagaaaaagaagttacagcaaagttctctatgagcaattctcgaaaagcaatccctagaccagcagctcagcatcacctggagatgtgttagaaatgcatattcctccagcctgggcaacatggcaagatcctgtctttacaagatatatattaaaaaattaaccaggtgtggtggcgtgtgcctatagtcccagatactggagaggctgaggcaagcggagcccttgaactcaggaggtcgaggctgaagtaagccatgatcacgcgacactgcacttgagcctgggcaatatagggagattttgtctcaaaaaaaaaaaagcattaatgaatactcttaaacatgaccccaggcccaggaggggaggggttggcaatgtgtgtgtgctttaacaaatcctgcaaacaattctgttaaagtttgatgcaccctaaggtttgagaaccactgatctatatcaatggttttcttttttttcctttttttttttttttttctttttgttgttgttgttgagacggagtctcgctctgttgccaggctggaatgcagtggcgcgatctcggctccctgcaacctctgccttccgggttcaagctattctcctgcctcagtctcccgaatagctgggactacaggtgcctgccaacgtgccaggctaatttttgtatttttagtagagatggggtttcaccatgttagccaggatggtctcgatctcttgatctcgtgatgcgcccgcctcagcctcccaaagtgctgagattacatgtcaatggttttcaaatttaggaatcatctggggaggtctttaaaaatgcaagttttgggggcctacacatctctttttaaaaaacttctcaggagattctaataattagccaggtttggatacagtgacctaaatgaaagtaatgtcctcagctaggatagtggtaatggagacaaagggatcacatagaacagatatttgtcagatactgtaatactgctagaattaaattaggccatgatggcataaaactcaataaagcagttactgttctgaaataactttctaatgggagaagagaggggcaggtgcttgggagcagaatgaggaaaatgtaggtagcattttggaacagcagaattgaagctcaaacgtctggaggtttccggatgtgataagtagtgccacaggctccaaatggatcacagagggtgaaggtgaagatgaaacgacaactagatttggcaatttggaagattttataacctttgtgatggcaattttattggaatgagaatttgaaggtaaggtaagcagaatccgtaatgctatttgttggcatgattgagaaatgaaagtataggcgatgggtactttttcaatttgaactgaagagagattgctaaaaactatgtgtatcaaagccatccgctcctcaactgtttacatataatgattgactttggatatgtggccttagactgttatctgcagagtctagttatgttttttgtgcttccacacttttgactacagacttctttgaaattccatttctgattattgtgttttaagttgttatatctactttcatatctgagatgttctgtcgccaggctggagtgcagtggcgcaacacggctcactgcaacctctgcctcccgggttcaagcaattatcctgtctcagcctcctgagtagctgggattacaggtgcccgccaccgtgcctggctaatttttgtatttttagtagggacgaagtttcaccatgttggccaggctggtctcgaactcctgacctcaggtgatccactctcctcggcctcccaaagtgctgggagccactgcgcccagccacatattcttgagtttaaaatggaataaggttttgaggtattcatttagaaaaaaaatgctgaattacatgacttattttaaagcaatagacaaaactaaaatattagttaaataaacattcttaaactttttttcaagttaataaatcttgacaaattatttgagttgacaaactgtgttgtattccccactgaaggtctcttggtttgctaagagatactttaggcatattttggtaaagctttggtcctctttaagtctgcagctgctttcagttgttgcctctaggaaggatgcttttagatgttctggtaatcctggaatggtagaattgctatttactctgatgaaacatttcacttggtccttccagaacaagttagggtcctctggaatcactgttctctttaagctaaataaggaatcaaaaataattcacctgaaagcccaagtcatataaaataaatattatccaaaactgttctataaccatgtgaaacttattaatttttttttaattgaagtgaagtctcactatgttgctcaggctggtcttgagctcaagctgtcctactgcctcagcctaccaagtagctgggattacaggcacgcataagcacacccagctagcatgtgaaactttaaaaaactgttcaataattttccctccgaaacttacttcgatgaaaaagtaagaaattagtaatgaatagagctaggtactaatcctgcctttgccattcattaacttctgtgtgatatgaacaaatcactagtggggtgttattttctcatattctgaaacataaaatagaagtaggaatatgtgtggtgggaggtgaatatgaatcaaaagagaaatgtattacagatatttattatagagttaaagtaaaaaataacagtccagaattgatcaagtgtagtggctaggagacaagtgggatcacaactgaaaaagaagggtaatcagactaaaaggaggtgtccaaattatttttctcctctccactcctcccaccccagctgtaatgttgatgctgcttaatcaattaactaacattaccaataagtaataaccaattaatgtgttaattcaacattatagttacagagacttttacctccaatatttgttactgttaaccccaaggcatagtataatatccttataaaaatatttaggggtgacatacttggcattgaatgattaaagaaggaaatgaaacgaataccaatatattcatttccaaagatatatgtatccacataattggacaaagactttgatttttttcttttgagacagggtttcattcatgttgcccaggctggttttggactcctagactcaagcgattctccccactcagcctcccaaagtgttggcattacaggcatgagccaccacacccaggcctaaattgcattttattagtttcctttagagataatccaaaatcagactatacacttctgcagaaaagtacttttgaactacacattacagtgtcctttgcattaccaggtacttcatgtttagtatttgttgagtaacagaaatcttgttttttaaacttcttttttttttgagatagagtcttgctcttttgcccaggctggagtgcaatggcacgatcttggctcactgcaacctccacctcctgggttcaagcaattcttctgcctcagcctccccagtagctgggattacaggcactcaccaccatgctcaactaatttttgtatttttagtagagacagtgtttcaccacgttcaccaggctagtcttgaactcctgacctcaagtgatccgtccgccttggcctcccaaagtgctgggattacaggcgtgagccaccacgcctggcctttttaaactttttacttgaactaatgtttgacttacagaacacttgcaaaaacagaacagagtgttcatgtgtacacttcttccagctttctttcttttcttttcttttcttaagagacagtgtctcactatgttgcccaggctggtcttgtctcaagctcctggcctcaagtgatcctcctgccttggcctccaaataaatatcaacaaatatttattgagtgcggtctgtaagactagtacagttctggctgggtgctgtagctcatgcctttaatcccagcactttgggaggccgaggtgggcagatcacgaggtcaggagttcgaggccagcctggccaatatggtgaaaccctgtctctaccaaaaatacaaaaaattagccaggcttggtggcggcgcatgcctgtagtcccagctgcttgggaggctgaggcagaagaattgctttaacccaggaggcagaggttgcagtgagccaagatcatgccactgcactccagttgggtgacagagaaagactccgtctcaaaaaacaaaacaaaacaaaaaagactagtactattctaaacacatgggtacagcagagaataaagcaaagatcctgccctcatgtagcttatattctgagagtaatagaaaaacaattaacaaataagtatatgttagggaatggaaagtgtgatgaactctataaagcagggtaagggagatacaagatgagacaagagagcaatgcactgtcagataaagccctttgacaagttgatatgtgagtaatgatctgaagtgaaggatcaaaccagatgcaaatctgcaagaggaatgtcccaggtcacctttagccaatctgttttagattttctgaactccccagatgatattaaggtaggctgcagacactatgaagctagcttgttttctggttacccttactctttatgtgtcccagtccaaagaagaggggggtgcggtttactaaggtgcccaaccttggcaggtccccatttcaaattcttgtaacgctggctccaggagctgccaaaagcacaactcaacctatgaggtgctctttatgactggaaaaagtccccaggataaaagctccttaagcacattactctttttttttgaaacagggtctctctgctgcccaggctggagtgctgcggcaccatctcggttcattgcagccttcacctcccaggttcaagcgattctcccgccttagtctgctgagtagctgggattacaggcgcgctccaccaaaaccagctaatttttgtatttttagtacagaccgggtttcaccatgttggccaggctggtctcgaactcctgacctcaagtgatccgcccgcctcggcctcccaaagtactgggattacaggcacaagccaccgctctcagcctcaaattactcttttaaatggctgtacctatttacactcctaccagcagcccaagagttcccattgtttcacatcttcatttcacccttgatattttttagcttttactttttgtcaaactgctggataaaactcaataaacaacctttagccattctctctcctttcagattagcctttctaataccatttttcagggatagttgactgtgttaccgcctagcacttagaaggtgctcagtaaatactcattgaatgatgtaactttcctacttaacatgctttaatgcttttccaagtccggaggcggctccccttttctgagagcctaataatcacgtattcgtttctatattcccagaacctaacaaagagtttgaaaattatcctgcaggcaccgctaagtcaatgttttttcggatgaatgaataaccaataggatatcgtatacttctgcgatgcacgcatttctattatcgcacacaccgaatcataccgtatttattacttatccacgcagatggtgaggtctgtagcctcggcatctacactgtgtctgaaagtaggcactaaaccagtatttttttaattgaaccgtaaacttgaatcaaacttggaagcatttaaagccaaacgcaaagatacatgcgcagtgatgcagtagggtcgtccaatcagagtagggcaggacagggcagtgcagcggctaggtagtgcgcacgcgcggcgggctcgtccgcgattggcttcgccgaggcgggatccttgagcttctccggcggcgaggggatagctggttaccagaaggacttctttgcagggccagtggtttctgtcagattttcgccggtgcgtcctgcagggggaagctcgggaggctgcgacagcctgtaggctcgtgcgggacaaagcagggagtggcgccggagcaggccaacgagggaggagggagggaaggcggcaggagcgaccgaagtggccttctgcgggcctgcagctttggtctgaagtgccagggacgccctggytgctggccccgggggccttggagcgaagggcgggcggtgggggtttagggttgtgcgtttgtgtgggagggatggttctgggcagtggcccctggggccgccactgcggtcgctttgcgcaggctcctcttggcttttgggtctctccctcactcctgcactgggaatttccttccccagggccagggggtgaaggctctgcgagcgtcctggagagtgtcggtacgccttctttaggggcttttacctcttcactggtcaggtttttcttgtatttccttaaaaccttttaatcgattaccttatggaagattttctaggtaggaacagatgcttctcgacttactacggggttgaaaatatcccaaatggaaaatggatttaaaacacagctaacctactgagtattaaagcttggcctagcctacttttgttatcaaaaaaattattttcagctgtttattttagatttgggggtacatgtgcaggtttgttgcatcggtatattacgtggtgctgaggtttggatacgattgatcctgtcacccaggtagtgagcatgttacccaatagtttttgaacccttgctcctcctttcctctcccttctagttgtctccactgtctattgttgccatctttatgttcatgaatgcccaatgtttagctcccatttataagtgagaacatgcaatatttgattttctgtttctgctttaattcgctttggataatagcctccagctgcacccaygttgctgcaaaggacatgatttcattcctttttatggctgcgctagcctaccttaaacatgctcagaacacttaccttaatctacagttgggcaaaatcatgaacacagacggttgtgtggttacttgtacagtttctactgaatgctcatggctttcttaaaagtcgaagaattctaagtgacaccgtcctaaattaggaaccatctatatagccggagtctcaaaggagcaatttaaggcatgaagtgaaataattactacctaatgtagttggaagtcgacaagcagcaacagcagggagagaccgttgctggttcttggtagagttggtgtacttacattcttgcatcctcgacgtttgatggttgcacatacctctctttaaagcccagacgaacccaaagattctggtcattgtcctgtatgttgaactaccccttctctatctccttcacaggaccttcatcatttctactctccgataatactaattataacagataacattgagtgcttactatgtgtcaagttttgttctaagtgctttacatatttcatttaatcctcccaacagtccggtgtgtaagcatgattatggtaccccctcttaaagatgaggaaactgagacacatggagccaaagtaaactgtgcaagaccattagaaagtgtcagtccacatttatattcaggcatttgctttcaaagttgtgttcttatttaccacagtgtagtgccaagtacttgtggctatctggtgtattrcagttgtcagcttggccttaccattttacttggaaggactgaaactaataggtgttatagaagttgtagcatcacatcagggctaccaaatggctttatttctaggacctggggaaagggctcagacagcactaattaattaattaatttattatggacaggacaatatgaacatacagaaccagtttaaaaagctataagggtgcaatggtcttttggggggaaatgtactgatttctgcattttactttdtatcaacaaattaaatggcttgatggatgcccaaggtcatatgtaagtagcagagttgggattctagccaggcagcctggctggctccagagtcagtctgttttcttaaccactgctctgtgctgatggttgtatgcttgcattatcatttttattagtttacaaaataggaggattgaaaaatcagaaatcatgtattagatgtagaaggatttagggtagtaattcttcgcatttagtgttgaaagaaattttagcatctagttcattctttattttataaatgagaaaattggtgtctagagagttaaatagcttccccaaagttaagcatccctgaaatagcagaatctgaactacactctggtttccttcatttctactgttgatgtttctaactactgtattttttaagtgttcctttttaaaaagtgtcagaattttcacagtattagaggggagtctgactaatgtagagaacagaactgattacatttcatgatgtggacatcatatttttattaatgctatctagaatttattagtttaagaaggctcattatcttatttcagttgagctatagtcactaaaatctttagttttaaatttcagcttctattgttctatttcatttgaccattaagtaactgagtctaagtgcaaggcctaacatccatgtcgtcctgtgacagttacygttaatcaatttcaaacttgtgtcagttatatatttagaggcctgtagtattctgcttacccattataaaaaggaaattagtttaatgaagttattttggcatgacttgtttggtcagaatttgtactgacttctggtattggtaaatactgcttctaaagcagtcaaaaaccatctgtttcataatttgctttaagattaaagattatactaatagagatctattttgtccttgaataagaaacagaagagagtgatctctcctactcattcctcaaactrtataaaggctggttatatataaaatatttacatgtttcattattttaacattgatgaaattgggaaatgtctaaccatcaatgatagtgtatcatggtttaattggctacactttttttcttggatacataaaataatggtacatcttacaatttaaaaaatttttatttttaaaatttttatttacttttaaaaatttcttttatatggactaacaatcaagagtatatcttacaattgatggcattttagatttgatgaaatatggtaattwaaaaaaatctaattaatgatacttttccctattacaaaggtaacattttcattgtaaaaaatttgaaatatacagaaaataactcagaatagaataaaaattactggtattctaaccagacctagaaataattagggttaatgttgtggcatgtatttttctagtttttaaaaaacgattgtgtattttaatatataacatgtatattatatctactttatagcagtataatttacagtgtgcagttagatgtgtacattttgatgttttcatatacagatgtatatatactcctgtaaccmtactacaatcttatatagattatttctatcacctcyaacaagttctctcatgctcctttgctttctagtcttttaaatgtacatacacccattattgtttttatttttcttttcttttgtaaaaattagaatgaggctggacatgttttgtggccatttttccttkgatttattaaaacatatttctcttgtcattaaacatttttttaaagtactgcccccccccgccacccattaatggtatcattcacataacaaatactgaacctcttctgtgtatttggtactggcgatatactgatgaattgtacgtaagatttcatgcctgagttaatagctcagagggaatgatagggcaaatttcattgcagtgtgaaaagtgcttgggtagtgcatatacaggaaggtctccagtccagtctttgggaggagatgaagagggctcatggttaagactcctagatgataaggtagaattaattaggcaaagaaaagtgggaaaaagcattcccaacattatataagggaaagtttgttcaaagcctagagaaaaagagaacatggctagcttggggaatagtactgactcgattttggtggtatatgaagagagtgttctgttgtgtgggtgtaccataatttatcttgtacttcattatagacatttgtttccctttttccccctactgtaattgatactagcatcattattctttttttttttctttgttttctttgagacagagtgttgctctgtcacccaggctggagtgcagtggtgcgatctcagcttactgcaacctctgcctcctgggttcaagcgattctcatgcctcagcctcctgagtagctgggattacaggcgtgtaccaccacacttggctaattttttttttttttagacgaagtttcgctcttgtttcccaggctggagtgcagtggcgctatctcggctcaccacaacctctgcctcccgggttcaagtgattctcctgcctcagcctcctgaatagctgggattacaggcatgcgccaccacgcctggctaattttgtatttttaatagacacagggtttctccatgttgatgaggctggtcttgaactgacctcaggtgatccactcaccttggcctcccaaagtgctgggattacaggtgtgagccactgcacctggcctcaaattcttatatttttagtagagacggggtttcaccatgttagcctggctggtctcaaactcccgacctcaggtgatccacctgyctcggcctcctgaagtgctgggattacatgcgtgcgagccactgtgtcctgcccagctgattattcttatacgtagttacttagtattatctctgatagttccttaggttaaattgccagaattggaatttctgggtgaaacagataaygttggtagtcatgttcatccttgctgatggcttatgttaaatagtgttttgtggtgttgctttgaattggaatgcttgctactatccattgcagaaacatgatgtatgtatgtaatgtccttgttttccatctgttcccctatccagtcctagtggaaataagattgagtgaaagttgggaaacctggttctagtctcttgatttatattttaaaaaattccactgttttcaaatgaagtaggatagtaaaaacaagtagaattataaaaataccttttaaattgccagatttcattcattcaaaatatttgttagtgatggtaatgtatctgtcactgttgccagacacattatagtcattagtggtggagaaaacaagcatgagattgctgccytcatgtggtttatggattagtggaataggaaaaaggcaacatgtttgatatttgtatgtgaattgtatttccttgcattttgaaatttttatttaaattgctttaaagaagatatcatgcttatagtattatcaaaattgacatatacttaaatttacaccatttgtattagtctgttctcacactgctaataaagagatactcaagactgggtaatttattaggaaagaggtttattggactcacagttccacatggctggggaggcctcacatttatgccggaaggcaaaggagaagcaagccacgtcttacatgggagcaggcaagagagtttgtgcaggggaactcccatgtataaaaccatcggatctcgtgagacttagtcactaccacgagaataggccctgcccttgacatggggattattacaattcaaggtgagattgggtggggtcacagccaaactgtatcaccgttcagtttaaatcttaaattcttttcaatagcccttgatgaaaaataaaatcttactagctattgaacttattttctttttctttttttttattaaaaaaaaaaaaacaagagatgggctctcttgggctcaagtgatcctcccactttggcctcccaaagtgctgggattacagatgtgggccactttgcccagcctgaacctgttttctcaggcttattctcatatgttttgtttttgttttttcagttgaagtcttgctgctatgttgcccagactggttttgaactcctgacctcaagggatccccctcacctcagcctcctgagtagctgagactacaggcatgcaccaccaagctcctcttatctttttttttttgagacagagtctcgctgtcgcccaagctggagtgcagtggcgtgatctgagctcactgcaagctccgcctcccgggttcacgccattctcctgcctcagcttccagagtagctgggaccacaggcgcccgccaccactcctggctaatttttggtatttttttttagtagagatgtggtttcactgggttagccaggatggtctcgatctcctgacctcgtgatccgcccgcctcggcctcctgaagtgctgggattacaggcatgagccaccgtgctcggcctttttttttttcttaattttaatttttaatagagacgaagctcctaggttcaagggatcctccggcctcatcctttcaaagtacagggattacaggcatgaaccaccacgccggccccttttacctttttacatatgtcatggttgtattaccaaaccaaacttgagacggcctgcctggcacagcaaagctctccacagacattgggatttgcagcaagagaaagtgaggcgtttattgcagggtgccaagcgaggaaaaatgggtagctaatggttaagacccaaactctgtgatggctttcatgtaactatttttaaagatggggaggcagaggttacaggcaaagtcataaatcaatgcatcattgatttggcctaaaaaggtgagacatcttgaagtgggggcttgcgagtcatagatgtattaaaagattctctgatttgggattggttaaggaagtgaagctctgtctaaaaacttggggtcagcagaaaggaatgttgagctctggcytgtgggtatgacttcctccaggcctctgaagaagaaattcagaacaaagaataayagcagttagagktcagtcctgtttcccctaatctgaggtctgtgtgccrgtagacagtattttccatttggtggtggtctggatttctgaaaaacaactcaaggacatatgttaagatgttacctttagtttctagagggaaccaaacattttgtcaatctaacttccctcaccattattttaagctattaccttcttgctaatcatattgctcatgtacttytcagggctagctaagtgcctggaatttcctttgaaggaactgaagattttccttttgtttctatgcttggggggccaggcaggcccataagaggggttyctgttccatcttagttgtagttttgagctatttttatatttgggggtgattgtaattagattcgtggatagttaactgttttgggtatttttcaggtcacgactgctgaatatgagacgatctgcagcaccaagtcagttgcaggggaattccttcaaaaaaccaaaatttatacctccaggaagaagtaatccaggtctgaatgaagagattacaaaactgaatccagatataaaattatttgaggtaaggcaaaaaaagactcatgatatagataatatagagaagcatgtatgtttaagaaaatgccatttaaagagttaacagtattttctgcctgtaggaattttcagtatctctgaaaacatcttctaaaaaccttggaaatgaagattacataatttttttttaaaaggaataacaggctgggcacagtggctcatgcctataatcccagcaccttgggaggcagaggcgggaggatcacttgagctaaggacgtcaagacctgcctgggtaacatagtgagaccctgtctctacaaaaaataaaaatttagyggggtgtggtggtgtgcacctggagtatcagctactcgggaggctgaggtgggaggatgacttgagcctgggaggtcraagctgcagtgagctgtgattgtgccactgcactccatccagcctgggcaacacagcaagaccctgtctcattcaatcaatcaatggaataacatgtacttgagtctataaaataaacttttggtaatgataagtaagtacctctttgagggaaggggtggagattctaatcagtgttctttttaaagttaccacataaataagtgaaaacttctttaaggtcatttaaagaggaaaaaatacataatgatttgtatcactattccaaacattttttctcacttttatctgtaaaaagtgaatactggctgggtgcagtggctcacgcctgtaatcccagcacgttgggaggccgagacgggcagatcacctggggtcaggagttgagaccagcctggttaacatggtgaaactccgtctctactaaaaatacaaaaactagccgggcatggtggcacgcgcctataatcccagctactccggagactgaggcaggagaattgctggaacctgggaggtggaggttatagtgagctgagatcatgccactgcactccagcctgggtgacagagcaagactccgtcccccccaaaaaaaaaaaaagtgaatactggaagcagtcttaatgtgtctcatttactgttaagaaaaaggattgttttggtcttaggtctaagatcaaaggcgttagtatatatgaaaggyatataaagtataaagaaggcatataaaatggagaattcacactacctactactctgcaattccctgatccttttatgttatagggattaaagtctattaattttttccctcttcttttttattgtggttaagcgtatgtaacataaaatttgccacattaccatttttaagtgtacaattaagtggcattaatgactttcacactgttgtgcaaccatcaccacaatctgtttccaaaactttttcattaccccaaacagaaactctgtacccattaaacattaactccccattctctccactcagctcctgataaccacgattctactttttgtctctataaatctgactgccctaggtacctcatggaagtggaatcatacaatatttgtccttttgtgtctggcttatttcccttagcataatgttttcaaggttcatccatgttgtagtgtgtatcagaacttaatttttttgtatggttgaataatcattatatggttttaccacattatgtttatccatccattcatctatttgatgcatgcttgggcagtttccacctttttgctatggcgaataatgctgctgtgaacattggcatccaagtttctgtttgtgttcctgttttaattcttttggattataactagaaatggatttgctgggtattatggtaattctgtgtttagctttctgaggaaccgtcaaactgtttttcatagctgtaccattttacatcttcatcaggaatgtgtgatggttgtagtatctacatcctcaggaacacttgttattttccatttaaaaaatttttttattattggcatctcagtagttgtgaagtggtatttcactgtggttctgatttgtatttccttaatgactagcaatgctgagcatcttttcatgtgcttattggccatttgtatatctttggaaaaatgtctatttaaggtctttgcctggtttttaatggkgtctttttttgctgaaaaaaccttctaatttttgactgctttttttggtctgtatgtgtttgttttatcctatatttctttcccaagtagattgtttagcacttaccaatgtaaaaattctggcacactgtaaggagaaaacataggcttttgttttcttaataaggtttctttctttctttcctttttaaaatacagctttatttaggtttgatagagtttggatatttgtcccttcagaatctcatgttgaagtgtgacctccagtgtttgaggttggcctaatgggagatatttgggtcatgaggggcggatccttcatgaatggcttggtgctgttttcatggtaatgagtgagttttcgctctgagtccacatgatatctggttgtttaaaaagagtgcggcatctcccccctccctcttttgctctccctcttgtgattgagatgcagtttccccctttaccttctgccctaattataagcttctggaggctctcrtcagaaacagaagctggcaccatgcttcctatacaggctgcagaactgtgagccaaaataaacctcttttctttataaattacctgtctcaggtattcctttatagcaatgcaaactaatacagatataatttaaataccatacagtctacttactacaactcagtggtttttattatattcacagaattgtgcagccatctccacaatcaattttagaacattttcatgacaccaaaaagaaactttttatcaggaatttatttcttattgctgaaatatcagttttctcttgctgctgaaacaaattaccacaaatctaatggcttaaaacaacacaaatgaattatcttatagttctgtaggtcaaaagttcaacacagatctaagatcaaggtgttggtaaggctatattcatttctggagattttaggggaaatctgttccctggctttctccagcttctacaggtcaccacattccttggctcatggtccccttcttccgtcttcatagccagggaagcacgtttgagttctcatgtttccttctctttggttttctgcagctagaactcatttgattaggttaggcccacctgggtaatccaggatcatctctccgtttcaaggtcctggtccttaatcacatctgcaaagtcctttttaccacataacaatacattcacagattctggggattagggtgtggaaatctttgggagccgttattctgcctaccacactgaataatctgttgttttaatataccacaatttatwtatctattcattagttaatggtcatttgggttgtttccactttttagcaattatgagtaatactcatgaacgtttgtgtacaaatttttgtgtggatatgtgttttcgtttctctcttttttctttctttcttttttttttttttttttttgagatagggtcttgatgatggcaccatcatggctcactgcagcctccacctactaggctcaagtgatcctcccacctccatctcctaagtagctgggaccacaggcatgtgccatcatttttaaatttttttagagatttttaaattttaaattttataggctaatttttaaattttttatagagatggggtctgcctatgttgcccaggctggtctctaagtcctgagctcaagcagtcctctcctcagcctcccaaagtgttggaattacagatgtgagccaccatacttggccatgttttcatttctcttgagtgtattcctaggagtagaattgctggatcatatgataattctatgtttaacctcttaatgaactgacagactcttttccaagctgactgctccattttcattcttaccatcaatgtatgaaggttttaatttttccatatccctaccaacacttattatctttttgattgtggccatactagtgggtaaagtagtacctcattgtggttttgctttgcatttctctgatagctgatatggagcacttttatgtgtgcttattacccatttgtgtatctctttggagaactgtcttttttttttttttttaaggtgaagtctcgctctgttgcccaggctagagtgagccactgtgtccaaccaatatttattatttatttatttatttatttatttgtttttgagatggagtcttgctctgtcacccatgctggagtacagtggcacaatcctggctcactgcaacctctgcctcctgggttcaagcaattctcctgtcttatcctctggagtagctgggactaaaggtgcctgccgccacgcctagctaatttttgtattttcagtagagttggggttttaccatgttggccaggctggtcatgaattcctgatctcaggttatccgcctgccttggtgtcccaaaatgttgggattacaggtgtgagccaccatgcctggccaagatttgttttttgatgtaatgtctaaggactaattctaggcaaaaacacagatttactatttttttcttttaattctataaataaattaaatagttattttactttttaaaactgaagtggggcatttttgaaattatacagcaattttaagcaaggtaacatgagaagcctaaaagtattaggcttagcagtcaactctgccgtctttttactttgtctgttacattcttaacttcttgtttttaaactatttcttatcttagattgaattaacctatagtgagaaagtattgctttagtgacttcagtggtgtttacttgattggtctgataaatacaaaatctgggacaaattgaacatcaaaagaaatatactaatggattatagcccattgaataatacaggagtcagaatctatactaatatatgtaaataaatgaataaataaataaatgaagattaaactcttccttacagtggaatgctaaagcatagaagtagaagtaatgatggtgttagagagtctcaatggatgccaaaactagtgggtaaatgttcaatgaggaaataggatatttgaatatattcaagtatctcctcacaacatacttaaaaaaattacaaagggaaaaatactttggcagacaccaccttaatcagtgatcaaagttaatacctctrgtaatggaacaaaccgatattatgtgcctcctaatatgatgaactgttgtattcttgccccaaattcacaatctgaaactaatcatagggaaacatcagacaaatccagattgagggatattcagcaaaataactggccttattttgaaattttgaaatttcaagaccagaaacgatgaatgaagttagagattgaaggaaactaaaggaacatactgactagatgtaatgtgtgatctaggattggatcctgatttggggaaaaatctataacagacrttattgcgataagtgaccaaatttgaatatagactgtggattagatactggtattataccagtgttaaataatcaattttgataattttactgtgattatggaagagagtctttggaaacacaccttgaagtatttagaggcgaaggagcatagcgtctgcagtttactctcacgtgtgtgtgtacacacatacacagagcaaaggaggagagggaaatggaagaaaatgtaaaccaatggttaatatgggtaaaggtatataggaatactatttttggaatgttaccatgaatttgaaattatatgaaaataaaatgttgcaaaaaagaaaatttgtgaccttcattagttgacttactttaatatctgatcagatataaaaaatataaaaaaaatttatcaggtttttttttggaaaatttatttactaaccatgaaatttattaagatgagtatttatggccgggtgtggtggctcacgcctgtaatcccagcactttgggaggctgaggcaggcggatcacctgaggtcaggagtttgagaccagcctcaacatggagaaaccccgtctctactaaaaatacaaaattagccgggtgtggtggtgcatgcctgtaatctcagctactcgggaggctgaggcaggagaattgcttgaacctgggaggcggaggttgcagtgagccgagattgcgccattgcactccagcctgggccacaagagcaaaactccgtctcaaaaaaaaaaaaaaaaaaaaaaaaamaaagatgagtatttataataacatgacaactttgcctattattgtgagtttctatttaaaaaaaattcaaccatttactactgtggtagacagaaaaaatggccctttaaacatgttcatgtcctaatcactggaatctgtgttactttacatggcaaaagagactttgctgacgtgattaatgttaaggaccttgagatggggaggttaccctggatgatctgagtgggcccattataattataagtgtccttagaagtggaagagagagagggaagaggatcagagaaagagatggtgattagggaakcagggkcagagagrtgtaacatagttgactttgaatatggaggaagarggctaagccaaagaatttgtttggcttctagaattttgaaaagacaaggaaatatattctctcctggagcatccagaaaggwactcagccctggtgataactttgattttaatgcagtaagacctaagtctgagttctaacttgcgaaactataaaatgataaatttgtgttgttcaatgccaccaaatttctggtaatttgagagagcagcaatagaaaacccatacatatacaaaaaaaagagaaaatagcacataatgaacttccttgtccatattacctaacttcaacaattgaaaatgtatgactgatcttttttttatttttattttttgaggcagggtctggctctgttgcccaggctggagtacagtggtgtgatctcagcttgctgcaaccttggcctcctggcctcaagccatcctcccacctcagtgttcaaagtatctgggactattggaacacaccactgtgcctggctaatttttgtattttttgtagagactgagtttcactatgttgcccaggctggtctcaaactcctgagctcaaggactctgcttgccttggcctcccaaagtgctgggattacaggtgtgagccaccatgcctggccatgactgatctcgtttcatctttttttttttgagacggagtctcgctctgttgcccaggctgcagtgcagtggcgcaatcttggctcactgcaatctctgcctcctgggttcacgccgttctcctgcctcagcctctagagtagcagggactacaggcacccgccaccacgcccagcttattttttgtatttttagtagagaccgggtttcaccatgttagccaggttggtctygatctcctgacctcgtgatctgcctgccttggcctcccaaagtgctgggattacaggtgtgagccactgcgcccggcctaattttttatttttttgagacagggtcttgttctgtcgcccaggctggagtacactggtgcattcttggctcactgcaacctctgcctcctgagttcaagcgattctcctgcctcagcctcctgagcagctgggattacaggcgtgcaccaccgtgtctggctaatttttgttttttcagtagagacggggtttcaccatgttggccaggctggtcttgaactcctgacctcaagtgatccacctgccttggcctcccaaagtgctgggattacaggcgtgagccactgcgcccggcctcttgtttcatctttagttttccactcyagctcragtccctcccttcttattttgatgcaaattccaggaatatgctttcatttgtaaatttttagaatatgtccctaaaatataagagctttttaaggccgggtatggtggctcacccctgtaatcttagcactttgggaggcctaggcaggaagattgcttgaggccaggagttcagaccagcctgggcaacatagtgagaccccatctctacagaaaaaaaaacattagctgggtatggtggcacatgcttgtagttccagctactagggaggctgaggtgggaggatcccttgggcccaggagttgaaggctgcaatgagctatggtcgtgacactgcactcttcagcctgggtaccagaccgagaccccatctcttaaaaaaagaggtgggggcttgttaaaaaaacccaacatagtgagattaccattatctcacctaaaaatatttaagtattgattttagtattgagaaatttaacaagaaaaagagcattttattatgagaatggcatgttatgatttgtttaaaaacttctgatatgtttaaaatacactataattataagcataatttttcattctgtcatatcattcagttttagtagcataatttaaaatagttctaaaaacaagcaataaaaattagattttaattaattagttaattttttttttttagatggagtctcactctgttgcccaggctggaatgcagtggtacaatcttggctcactgcaacctccgcctcctgagttcaagcgattctcctgcctcaatctcccaagtagctgggataacaggcacttgctaccacgccaggctaatttttatatttttagtagagacagtgtttcaccatgttggccaggctggtctcaaactcctgacctcaagtaattcacccgcctcggcctcccaaagtgttgggattacaggcatgagccaccatgcccagcagatattaatttatttttaaatatctagttctagtttatatatataaccagtatgtcctgttttaaattagaatcttttatgtaaaaatacagaaaatacagaaaattaggtttgakttctgatttaaatatatatttgtttcttttagggtgttgcaattaataacacctttctcccgtcacaaaatgatcttagaatatgcagtttaaatctgcctagtgaagaaagtactagagaaatcaataacagagataattgcrgtggaaaatattgttttgaagcacctacactggcaacattasatccacctcatacaggtaagactgctttttattgataaggtttatgcttgaccaatagtattacagtattctttaaatgatgttttaagaatgaatatgttatattagaaaattgttgatgtaataccactacattgttggtagttcaggttttttgttgtcataatttatctttagtgattggattaataactgtgtgattaaagtgctttatagtagatgtatgcttaagactgttkattataaacttggtcaaatgtgatcttttcctcaagaaccaagattgtgtttaaagataggatttatacattttttttctaaaaagcatgttaataggactaaaattggagagttgaacttgaaaktagttacttgttaattcattagagtctggagtacttcaaatcagagttgaattattatgatacatacttgcatgaaaaccaagcatttaacaaatgctccatccctctattgttgaactgagttaaaataatgattatggttctttttgtatatgtaagagaacactatttgttaggtaactaaaaaaataattaagatggttcatagatgtttatttggtcttgtgaaagccatcattagactgtatttttccaaattacattttattcatgttttggttgaatgaacagattcagccagccggccccatctgttgggctacagaatagtaactgccatccttatgataccagtgcaaatcaacaaagtgccctaagcaccattttgaaggaagttcttggacttcctgatgattaatgaattttacctgtgaatgggtttgtatcttgtcsggacagaaaggaattctgtatttacctaactggccattatcttggtgccatttatgtgctcctcataacttttcaaaagctgtgactggtgtcagaacaaggtggagaaagactttttgagctgattcagtataggargatccctaggaacagctctgggcatggcagtttagctctgctctatcttactgacttgctctcccttctttcctccctattttccccacttcctccttccttgcttccatccttgttaggtgactattctgttttcccagattttcttttctactttaagcccgaggtagaaaatgatccatgtatgcycagttcttttctaatttcttcatcagaaaatgacatttagactctggaatataataccttttatgttactaatcttgggctttatttgtattctaccatagtttctcattctcttccctgctaaatttgagaagggagttaagagttaagataaaataaagagggagttaacttactcaactcctaatcccgtaatcctttctctgattagtacattcagtggactggagaacctgtgccaacctcctgataccctcctgtttcttgttcagaaagaggttaaattggggaaaaaagctttgtgagaaatgttttgttctctatggtggattgttggagagggatgtagcatatagaaaagcatagagatgagagacctgtttagtatccactcaccctttcacatctttttcattcttgatctaatccaccttgaaatgaactacaaatctgtatgtcccagttaaataacatatgtcattttccccatcacctttttattttgaaatatgcctacaaactctcgagttgaaagaatgacgcaattaacatcctaaactcaccagttactaacattttgcctcatttgtgtgctttctctctttttctctatgtagatgcactcccctcaaccttttgaaaataagttgcayatatcatgccactttacctctagccacttaagtgtgtatttcttgaaataaatgttttctcctgcataaccacacattgttattataccaaacaggattaatagtaattcataatatttagttcattgttaatgtcatttttgcttaagctagtttcagtttggtttctctttcaactgaaagagccctgataagtacattttcactttcttgaattcacgggacactttgagtctcttcataacactgcgtgtttacagataatatcctttgtgtgagaatgaagatgtaggtctaccactaatgacttcccccaaagcttagggaatgtgatttctttgggggttgtggtagaatggccataggacccacttctatcttttttgatccaagctccacaggtgtttcttttcatgaacaatccagttcagtacttttgaccctgggctttcaaaaaccaaattctgggagaggggaaatgtagtggcttcaattgtgtctcctaaagatatatgttaaagtcctaagccttggtacctatgaatgtgaacttatttggaaatagggtctttgcagatgtaatcaagataaagtcatactggattaagatagaccctaaatttaatgactggtgtccttatgaagaaagagatagaaacacagagggaaaaagaccatgtgatggtggaagcagagattggaataaccacccatgattgctggaaaccaccaggggctagaaagaagcaaagaaagattctcccttagaaccttcagagagagcatagccctgctgccaccttgattttggacttctggtttccagactgtgggagaataaattctgttgtttaaagccacccagtttgttacaggagtctcagaaataaatacaggaagccccagatctcttgggtattcagagctatatagtttctttagaaaaagagaaagtttttttattctttctgattctttctcattctgaagaactgtgagaggagactatgccatcttctgttatctgtttacctgaatctccttcacaaaactgtgacatgcaaaggcaggaatgttctcttgttaaggttttaaatcaaactatatagatttaaaaatgttttgtgactgaacaaagagatcctgagaaacttacagttttctctagttgagtctcttggctgtctttggcttcagagtgcttcagggaagtcaagtagccacaaagaggctattggaacattatagtttgcaggctctggtaatatttgagagaataatttcacaagtgttttggaacaaaagtcatgctgtaatggatatgtgatgaatggaaataggccagtggaggaagtgaatgcgagtaagtatgtaaataaagtttgtaagtaaataaataaattcggtagtgaaggaagtagtatctcgaggaatggtagggggctagagagttttgttgtgtttttgttttmaggtagtatgttgtaggctgagaggaaaaaggtagtgaagagtggaagattaaaggtataacaggggagtgataaaaatctttccccattggagaagttagctaaatgtttcttaagtgggtcttaggtccttggagatggttgggcatattctcaagggtttataaattctcagataagttagacttttgtgttttcttttaaatgatatgaataaaagtgtatacgctcgtgctagatcttttggatagctgccttataattgagtgccattacaagattttatgcctgcagatgagaacaagtaaacaactgtataagtggtatactcttgccaaatgaaggtttcccatattcaaatagggatggtgaatgaattaagccatctcatcccctattggataaaaggcttgttaaacacaaaagatgtgtgtcaaatctgttggtatcatatttatattgtaattagcagtttaaacttagcaaaatattactatcatgaaactaatatattttaaaatattttattggttttatttgtattcataaatgtttgttttttaattgtgataaaatatacataacatacaattcaccattttaatcattttaaagtatacaattaagtggcatttagcatatttacaatgttgtacaactgtcacttctatctagttccagagcatttttctctaaaaagaaaccccagatcaattaaatagtcactctctttctctcctctctttccagcccctggcaaccactaatttgctttctgtctctatgggtttacctattctggatatgcgatgtaatgagaatcatgcaatatgtaatcccttgtgacttttttttttttttaaaaggtaatgcaygcacatggtaaaaaactcagaagatgttaagagtatagtaaaaagttggccgggcatggtggctcacgtctgtaatcccagcactttgggaggctgaggcgggtggatgacctgaggtcaggagttcaagaccagcctggccaacatggtgaagccctgtctctactaaaaatacaaaattagctgagtgtggtggtgcacacctgtaatcccagctacttgggaggctgaggccagagaattgcttgaacccgggaggcagaggttgcagtgagccgagattgcgccgttgcactccagcctggacaaaaaagagcaaaactccatctcaaacaaacaaacaaaaagggaatatagtaaaaagtctcccttccctgttacatagctgtctacttcccttccccagaggtaaccagttactagttttttgtatgtcttttttgaagtattctagaaacatatttgtatacatatatatttttttctccatctaaataattgttcactagcttccttgttctatacattgcatttttactgcaacagtatatcactgaaatctttttgtcaatgcatttagaactaccttatttatttatttatttttttgagacggagtcttgctctgtcacccaggccggagtgcagtggcgtgatctcggctcactgcaacctctgcctctgggttcaagtgattcttctgcctcagcctcctgagtagctgggattacggcacctgccatcacacctggctaatttttttgtatttttagtagagacaggggttcaccatattggccaggctggttttgaactcctgacctcaagtgatccgcccacctcagcctcccaaaatgctaggattacagacgtgagccgctgtgcccggccagaactatcttatttttaaaactaattccactgtgtggatgtgccaaatgtacttaaccaatgtcttaataatggatatttagtttgtttgggatctttygttattacaaatagagctacaataaatatctatataatatatacatataggagactatgttcataaataccttggagtaggatactcrtcacaaggtatatgcctttagcattttgatggataatgataaattgccttctacagaggttagtacaggtttatactctcatcascaatgcgtgaggagtgcatttatcatgtattgtgatgctcaatctatatgtaagtatatattcatatttttgatatttgacaatctaagttaaacagtgttattttgttgtgctttcaatttaaactttttgatgttaaagattatttaaaaattacagaaaaaattaaggatagtaggctgggtgtggtggctcaggcctgtaatcccagcactttgggaggccgagatgggtggatcatgaggtcaggagatcgagaccatcctggctaacacagtgaaaccccatatctactaaaaatgcaaaaaattagctgggcgtggtggtgggtgcctgtattcccagctactctggaggctgaggcaggataatggtgtgaacccaggagcggagcttgcagtgagctgagatagcaccattgcactccagcctgggtgagtgcagactctatctcaaaaaaagaaaaaagaaaaaattaaggatagtataaaaaacttccacaaatttaacatttttgtgtgtattgtatgtatatgtgtaatgtttcagtactagttgagaataagatactgacatggtgctccatcacctgaaattcttcagtatgtatttcctaaacaaggacaggctgctatatgataaagtacagaagtacaacagtcaaaatcaggatattaacactgatacaatgctatggtctgaatgtttctgtttctccaaaattcatatgtagaaacctaagcactaatgtgatggtattaatattaggaggtgagggctttgggaggtgactgggccaggagggtgaagccctcatgaatgagattatttcctctgtgaaacaggccccagagagttgccattyctctttcaccatgtgaggacacaggagacagtgccatctatgaaccagaaaggaggcccttaccaaacactgaatctgccagtttcttaatcttggacttcccagcctttagatctgtgggaaatacatttctattgtttataagctacccagtttatggtattttgttatagcggcctgaatggactaagacaacgtcctttatggcagaaacaaatttaaaaatgaataaactttttttttttcctgctrgaccaggatatgtgttgtatttagtcatcgtgtcttttagttgccttcaatctggaacgttttcttagtctttgcttctattttgtgactttttaacttaaggagtacaggccaatcatttgttgaatgcttatcagtttgggtttgtttgatatttccttataattagttttagtttacacatttttggcagaaatatcacggaaatagttcttagtatatcaatcagaaggcacatgatgtcaatttatcccattactggtgataataagtttgattatttggataaattggtgtcagcagggtttcttcaccataaaattatttttacctttgaaattagtatctatggagagttactttgaaatttattactataattgttgccaaatgttagttttctcattccatctatatttattagttggcattctgttgcaaggaagagctttcccttctcccccatttatttgttaattaatttttatggattcataaatgtctgttttattcagtgggttataatctgttatcatttattatgatgctcagattgtctcagatttggccaatgggaatccttttaccagggttcctgtgtccttttgacaatccccatcagtttttgagcgtttttgtgcttccggcacaataagatctttcctgccccagctgtagaaatcattcaagagccctagttcttttttggtggagaagtgtatttaaaaaccaggaactgaccactaggtgtactcattgatactgcagtgttattgcttttagctcttctagcagtcaaaactcgaaaatctatatatgattacatctatatttatctataaatattaaaaamcatcagctcataccaatacctccaattctaatatagtaccccagggttcattttagtttgcagccctttctttcatagtgaaaaatttggttattgttatcttaaatatatttacctattaatttctgtttaaccagtctatcaaaaagggaccaaawttaatagtaaattttttttttttttgagacagtctcattctggattcaagcaattcttgttcctcagcctcccacgtagctgggactacaagcgtccaccaccacactcagctaatttttgtatttttagtagagatggggttttgccatgttggccaggttcgtctcgaactcctggctccaagtgatttgcccaccttggcctcccaaattgtgggattacaggcacgagcctggctgagattttatatccttattaaaagtgcttatttgaatagaagttagttatactttttctcacagaaactatgacatgataaaacttcttttgtttgtgtatgactcttttagccccatcataaaaagggtttttgcatartatttgtggattgcttaacttttcctaggggcctaaaattctttgatattcaggtcagtctctttccaagtacctatcatgtcaaccttttgcaaratttgctgtttcattttgtagttgattgtcatgcagtctcaaagagactttgatattatggttgaggtttaagggacatttgaatggaaactgatttttaaaaatttgtgaccagttgattggtgaatctgttttcttttctagtggctcttacttccttatataacaacctagacataactgcaaggaatcagatattgaatattcagagccactatatctttttccccatagaaaattctccacagacaattgagttttgaggagatcatcctttgtcctttagggctcttttatgaagatttgggtcagggaataaattaggttttatgatttttgggcgtatgagcattgtttctgatccacacagtcagtagtccagtctgctgaagaaggggaaacatgataggtgtatcctttctcctttcaaaaatacaccattgaagataattctcccctaactaatttgccttctagttcttgtcctagttgtcaggattaagaagggcttttgaggaaacctatacactgggactgttcttttgaattcctgccttggatggaagtgaataaaaaaggtcctaaaggtactaaaaaaggtcctggtcatttgaatattgactctctcatatgcatccttccaaatcatcctraaggatgtttgaaactactgaggtgttatccagggctatttctaggaggttgggttatcaaattctctccagagtatagaccatttccttctttttttttttttttttggagacagagtctcactctgtcacccaggctggagtgcagtgatgcgatcttggctcactgtaacatctacctcctgggttcaagtgattctcctgtctcaggctcctgagtagctgggattacaggtgcccaccaccacacctgactaatttttgtatttttttagtggaaacagggtttcaccatgttggccagctggtcttgaactcccgacctcatgtggtccgtccgtctctgcctcccaaagtgctgggattacaggcgtgagccactgcacctggccaccagagtatagagcattattttttagatgggtcactcaagggaagaggcaacaacctgatgatatggatattgggcagtagttaattaacatgggttctagagggttgtctgtgtgtgtgtgtggtgggggrcgggggggaagggtgtggtataagacctaatattaaagctcaatttaaaacattttaaaaataaattttattgtgcatacctgaggtttacaacatgatgttatgggagatatatatgtgtgtatgtgtgtgtgtgtgtgtgtkcrtgcatgtgtgtatgtatatgcatgtgcacacacgtacatatatagagacagtaaaatggtaatatagtgaagcaagttaacatattactcatcacatatactgttttttgtgtgtgaccagagcacctaaaatctacttatttaacaaagtacctaatacaattttattaactatagccttcatgttgtatattagatccctagacttgttcatcgtacatatccactacttgtatcctctgacgcgtatctcccgatttcctctccctcctcccccaccaacccacctttctgttctagtaaccactgttttatttttaatctctgtatgtttggccttttttttttttttaaagtaacattccacatataacgtgagatgcagtatttttctttctgtgtctggcttaattcatttagcataatgtcatccacatccttccatgttgtggcaaatgacagagtctccttttttaaggctgaatgatattctattttgtgtatgtgtgtgtgctcccatgatgcagcgaacatgggagtgcagatttttgagatggtgatttcatctcctttgggtgtgtgccaagaagagggattgctgggtcatatggtagttctatttttaatttcctgaagaacctccataatggctgcaccaatcttcattcccactaacagtgtacagggttccctgttctccacacccttgccaacatttgttatctcctgtttctttttggtgggggagtggggcggaggagacaggatcttgcttggtcacccagggtggagtgcagtggtacaatcatagctcaatggaaagacaaaaaaaacccaaaactatagaatagttgaaataataatgacattcagcctctactttttggagaatgaactgtcttcctatcttgtctttcatttgaatcctcatttaaaaacaaaatgtcagagaagtggtaatttgagcaaggtaacataggcaaagaagaaaacacaagggaaagaaaaaaataaccaaaaagaatatatttttatatcagctaatatgcttttggttcaagtatcgataaaaatactagcttatataactgaaggtttttattggcatgtataactggaaattccaggcttcagggctgactggtctagcagtttaaaggatattgtcatgagcccagtttctttctatttattccatctgtcatctgcaggatgggttgcattcttagactggctccactcatgttaaatgatggatcccagcaactactgtggccacacrctttttctcatctatctcatgacaggcagatggttcctactcagaatcactaaataagatttcctaactttgtgctattgctgaccactttcctgtgaccaggggtttttctaatcccagtcttagtttgccatcgtgaagaggaatccttaccagtttctgagaatcctcagtgtacgaagcaggcacatacttttcatctccttccttagaagtgagagttatttcacccagattttctggctgcaacacaatgagtgagtggtgtagtgaatattgtgagacgccaccagcaaacataatgttgactatactgataaaatgattaagtgaaagaatggctaaaataaataagagtagcttagcaatgtttgcagtatacaaaattcatctaaagggcaggccagcttctgaggcagagaggctcctttagctcaacatatttttacaccaaggacaagacttggccaaacagagatccttaatagacagctgggagctattttgtgaagatatatgtaaatttagattatatagagtaggtctgtgattcatgtagcatgggtggagtaaattttataatttgactcctttggttttgtgagggttttcaaggtccttaaatcctaggttttgattgtcttractgcttaacatcacagaatatcaccaccaaagcacagtgatgaagtgtgagatatttaaatgctgtaactgagaataactcttagagattggatttaccctagtttttgccctatttttatgtgacagatttttttttttttaagtcttatcttcctctcatgttgcattgtgattatatcaaacataatcttatgtgccccttcagagtcccttggcaccatctgcctcgtagaattttctgctgccactggaggctaaccagttgcttcatctgaggaatgagggccctatgccttggtggccaccatctagctaagtttatgaaccatactctgggagggtctggctcctcctgccacttccaatcttgggtataacgccacacaacatccttgtaggtagcaccctaagcatctgtgaaggccagatgacacaaaatgaagtrcagtgtacttcagggtggactttgaccagtgggaaataggagacaggagggaacctgccagataaatttcttttcccacatggactactctgaggtatggtttctttttgtagtctatcaggagacattccacaaagagtacaccaagtggatgcatttgttaagtgacctactattttttttatagcttgttgtaaaatggtagccagcactttcccttgctttatatattttcttgcctcagtttaccttctcttcacctttgatgccctgtgtatgcacctctcaagtgaaacatcagcattttaatcaggctctgtttgccagagaactgggccaagacaaagattaataaggcatataattcttatcttgactcttttggactacctcctaaaatacagaaaaaatttctgtaatcactgtactttttgtgccttaaaaagagtttgtggaaaaaatcacccctaccccacaattattctttactattatatctaatttatctaagttttagtaattcaactttgttcaaactttgcacatttttaatggctaaagastttaaaatacactacttgctatgttttctttttaatgataatttttgaacattttattatgatactttaaaaaatcttacataaatgttgaaagaattttgtgttgaacacccataaacctaccatctcaagtctacaattaaaattttgctatatgtgttttattatatatttatccatcaatctacattaattttaaaaaagagttctaaagtttcaaatatgagtacgttttcctcaaaataattcatgcaattcattaagattaatgtacttaagcctaagtgtggtggttcatgcctgtgatcccagagctttgggaggctgaggtgggaggatcacttgaggccaggagttcaagaccagcctgggcaacatagtgaggccctgtctcttaaaaaaaaaaaaattaatgtacctaaatacattcttttcataaaactatctaaaatactgcagatacaactcagctgttattgtgggtgctgtgcttcaaataaatggtgttattcagtatttatctgcttacaactttgacacttgtgaataaaaaaatcaagacaattaaagtggtaaaaacaaattttattcagtaaccactggcaataggggaaagagctgagctccatgatttgtgcagtcatgactgggccttttaaagggagaatgagggagtacggaaggggagcaactgagggctcaagtagcgtcaggaaagtgaaaattacaaagggctggtgctgtggtttgaatgtttgtttttcccccacatttatatgttgaaatcctaacccccaaggtggtgatattaggaggtagggccttttgggaggtaattaggtatgagagtggagccctcatgaatgcgattagtaccctttaaaataggcccaagagatctcatttgttccttctaccatgtgacgacatactgagatggcgtcatctaagaaccaggaaatgggcccttaccagacaccaaatctgctggtgtttttatcttggacttcctagcttccagaaccacgagaaataaacctgtgttgtttataagccacccagtttatgatactttgttatagcagctccaggctaagatagttggtcattgtaaatgtgagtgggtcaggtgtgcctgctcgctgacagttatcaaaattaggattctgtccttccacagagactgggacacagagatccaaaccttcctgatgattacatttcaaaggagtggctttctggttcttgagaaagacactgctgagttgtaggagatacatacacatctcaaagggacagaggaagaatttacaattgtaaactcttcttagtgctctaagaaaggaaggtyaggggcctayagtcaggtgttggctagaataaacagtaagcttcttttgatagccctgaacttctccagacagactggagctcaaaaggaggctgggtattccagggctgagtggaggtgggctaggctactagaagctttgctagagttggtcaaggctcttagagcaagaatttggatggagttgtttgccaagaattatttacagttctcattagtttgccttggatgttttttgttttcattttagaacacgtagatccaccttattctttttaattgctgcaaagtataccatggtatgaatacatcatagttgtttttagttttagtttttttttttttttaactattaaaacctctgcagygaacatccttatgcatgtggtcttgtgaacatatgcatgtatttctcaggagttgtcagatcataatgtgtttgcattacactttaatatggtctgccaaattgccttccaaaatgactgccatcattagtgtatgagagaatttattttcccaacttcttcaacacatgttactaaactttttaacttttgccaattgaatgaggaaaacctactgttatcttttgtgtctccctgtttacttgtgaagttgagttctttatatgttggacatttgtgttttattcattaagttatctgtattctacaaccatttttctattgtatttcataagcataaaatttaatataaattttatatgatacaggagccttcataagtaaakgaagactcaaaaaattggtaaacttgtatattttttatttttacagtttatttttatttattgatacataatagttgtacatattttgggggtgcatgtgatattttcatatatgcatacaatgtgtaatgatcaaatcagtatattaaccaaaaatgtgactcaatcagaggtttattaagccaaagtttaaggatacacctgggaaaaacacaagtcacaggagcatctgttacctgtgctttccaaaagagggtttctggaactcagtattgaagaataaagagcaagcagaagggacaaaggaaggtaagagaggcagtgagacaaatggttacatttttgtgaggctctaattagtgctcagtaaatctgtgttttacataaggtaaggtaaacatttgaaaagatggagtagaggaaagagtcagttatgcatccatctcgggttagccgaaggagtgatttttttttttttgataatttcattttattcccttgggttattactattattatttttcttaaacttttatttcaagttcaggggtacatatgcaggatatgcaggtttgttacataggtagatgtgtactctggtggtttgctgcacaggtcatcccatcacctagatattaagccaacattcattagttattcttcctgatgctctcctgaccatccctataggccccagtgtgtgttgttccccacaatgtgtccatgcgttctcatcattcagctcccacttataagtgagaacatgcgatatttggtcttctgttgctgtattagttggctgaggataatggcttccacctccattcatgtccctgcaaaagacatgatcgaaggagtgattttytgtcttgtccctgttgtgtacctaagaaggtaagcttgtaattgacattgtcagcatgagatttaacagaactcagttttgagagttaaacttaggttgcacacccaaggttacaattggcatgtgctggttttaggggatatgtatcctgaaaggtttagtgactaggaagggattttcttatgagaaatttgtgagggaggtatatgtccttttgccattgcgggacaatgctgacttaacgtgtaatgctatgacacagggttgtgaaattatagctctggggggaaagaggaggaaggaaaggcagtgttgcatgactaattttctaggtttaactttccttttggtataatgagtttggggtcctaagattttattttcttttacaagagtaattaggacagccatcacctcaaacattttttatgttgggaacatcccaattcttctgttttgaactatacaataaattgttgttgactatagtcaccgtattatattactgaacactagatcttattctttctatttaactgtacttttttttttttttttttttctgagacagagtctcgctctgtcacccaggctggagtgcggtggcgcgatctcggctcactgcaagctccgcctcccgggttcacgccattctcctgcttcagcctcccgagtagctgggactacaggcgcctgccaccacgcctggctaatgttttgtatttttagtagtagagacggggtttcaccatgttagccaggatggtcttgattcctgaccttgtgatccgcccaccttggcctcccaaagtgctgggattacaggcgtgagccaccgtgcccagcttttaactgtacttttgtacccattaaccaacctctcttaatccccacctctccttcccagcctctggcaaccactaatcaagtctctacttccatgagattcacccttttagctcccacatgtgagagagaacatacggtatttgtctttccgtgcttgggttatttcacttaatataatgacttccagttccatccatgttgctgcaaatgwcaggatttcattttttataaccaaataatattccattgtgtatatgcagttcattttctttattcatctgttgatggacacttaggttgatttttttgcctttgtttattgactgtttcgtaaacattttgtttcacaaaaatctccaactgaagttaataataggtgatattgtggaatatatgtttggcctttgaccccgtttccctggtatacaactcctaaaatccttacgacctccaaagtaatgtctgtttgtgtgctagtgattgattgatggctgacagcccctaggtagtttcaggatgtgagttggttacgtgaaagaccaaggcaccattagagagttggaacgttcagcctcacccctatctctggggagaggagagaggctgagggttaaattgattaccagtggccagtgatttaatcagtcatgcctatgtaatgaagctttcwtaaaaagcccaaagccctgtgttgtagagcttcgagatagctgaataagtggaggtttctgggggttgtgcctggggtgggcatggaaactttgtgtcccttccaccataacttgccctatgcatctcttacatctggctgttcatttgtatcctttgtaatatcctttataataaactggtaagcgtgtttctggagttctgtgaccactctagcaaactaatagaacccagaggggattgtgggaaccccaacttgaagctttttggttagatgttctggaggcccagacttgtgactggttgtgtagcaggacgagccacagacaaaacctctcagacaccgagttgtagaaggaagggctttattcagctgggagcatcggcaagctactgtcttaaaatctgagctccctgagtgcacaatttctgttccttttaagggctcacaacactaaagatttcacatgaaagggtcgtgattgatttgagcaagcagggagtacgtgacaggggctgcatgcaccggtggtcagagtgaaacagaaaagagcagggagtttcacagtgttcttccatacaatgcctggaatctatgggtaacatcgggttctaagtcatgagttaatttttaactactaggtttaggccaggcaggcccaggcctggttttggacctggcgccgggctgcctgtctttgatttcacttccttgtttttttcttaaaacaggtactgagtataaaacaatataaaacaatatgagagggtctctctcttccctcaggtggggccatggggtttgtggtactgagctcttaacctttgagatctaacactatctcctgatagtgttggaaagttgaattagaggatacccggctcctctccactgcagaacttaacttcttgcttggtgtgtggggagaaactcccacacatttggtcacacaagtcttcatgttgattgttgtggtgtgagagcagaggaaaaacagtttgagtttttcactctcagacagcacagtgattcttcataaaactctatgactacaccaacgagcattggcaaagaacaaaaaattattcratgtcttttaccagttccataaactggcagtgattcatagcatttacacatatattcgtaatattcttaacaagtatatccatgataccttttcatagtctgctttagaaagtcctgcatagtattttccacttaattctgcatcagtagtatagcttcttttaatttaaaaacttgtccattctatttttaaactagaaagataattttattgtaatataatcaaacagtaataaatatttcagattaatcatcaattacaatttacataggttatcactaatttgtgctgtctgcattgaggactaagctctgatttttttttttttaatcttgcctaaattcctatctaaggggtctggggaatcatgctctgtaaaccatacattctcatcagatggttttatttaaccctgtatatcatgacttactttccgatctgactctggcataacatggaagaaaataaaaatattttaccccaaaacatgtttctctgccatatcttgaaatggtcgtgcaaagccatcccttgtgggaaaaatccacattctatagagaatccactttccccttgttttccttccttcctttctagatccaggagataatcaagtaagagccaggcactcytttaggtctgataataaacaatatacaacctgttctctctgaagtctgctatctgagagcttcctctgcacaataaaacttggtgcctacaatcctttatctttacctgaacatacatttcctttctattgatcccaggtcttcagataaactcaaccaattgtaaaccagaaaacgtttatagcctggaacacygcccccgccgccaccccgcccccgccttgagttgtcccgcttttctgaactaaaccaatgtatttcttaaatatatttggttgatgtctcatgcctccctaaaatatataaaagtaagccatacgccacccaccttggcacatgttcttagggccacctgagggctgtgtctttggccatggtcactcatatttggctcagaatcaatctctaaaaatattttatacagagtttgactcttttcgttaacagcgtgatatattcaaacacactatgatctgcgtctttcattttaatgctgcctggagtagaccatgatatggatgtattgtatgcttttaactccaactgatgtgcttttagattgcttccactgtatgcaactgcaaagaatgcttcgttgctcccgtgtgcattttatttttctaaggtatattctgagacataaaattaccacaattttagaagatttcctactcatgtaaaatattagtagatacttccagatcaccatccaaaatgtcattttacactcccttcagtggtacagaagagtactctttcccttctatccttttccactcttggagtcttcttttttttctttttttgaggcagggtctcgctctgtcaccgaggctggagtgcagtggcatgattatggcttagtgcagcctcaacctcttgagctcaagtgatccttccacctcaggttcccgaatagctggaactacaggcatatgccaccacacctggctaatttttgtattttttgtagacatggggtttctccatgttgcccggtctggtcttgaactcatgtgctcaagtaatccttggcctctcaaaactgttggattacaggcccatgtgccactgagcctggcctcactcttggcattttaagtcttaaaaaattttgctaatctaggaatgaaaatcatttttagtatacatttccctgataactagtgagattgaacattttttcatattttagtagtgtttcattcttaacataatacctgtatttcttctgaaaataacaaaataattatctaaagtatataccctgtgttctgtaatacctgtatttcttctgaaaataacaaaataattatctaaataaagtatataccctatgttctttctttggttctcttttaatgttccaaaagctcagaaaatgctagaatgattttgagtacctgtggtccagttgttgttggggcaggtcgattttctttttgcatctctatggacaagaatcatttgcattactgatttctacaatttacagagctgtgaaactgctcaaagacaatgaaagggtagaactattatggaatcaaattactcagtagcgtataccagacaacatctagcattccgtagaacatccagcaatctttcactgttttctgaaagataatacacttaaagcttttaacacattggctcacagtgagagctcagtaaatgtaatttgcttctccattgttaaaagaatgaaaaacaagataattgagaatttatagcatttctgtggaactacagttccctggataggtgctgtatctagattcatttttgatttcattgggtcttgcacagtgcctgggagcatttatatacgtggtcrgtaattaaaaacaatttatttttcctacctcttaatarctatcacagttgttcagtaatagttttattggatagaactatgttcaagtatgttctaatttattcccctatctggaaaaatatgtatattgtgagaaaataggtttgtcttgcttacattattatgtatcatatattttcatactggggttaacaaatatattctaagcaccgaaactggtggccttgaaaatggctagactagctgtttcctttcayagtccaaactgtgtgaatatagctaaataaaaaatctggctctattataatagcaaatgtgattttgtatgtggagtcttaaggcgtgattatactgtttctcaccatgaacagtgattttttacacatgataaggcaggctagcaaattcacatacattacggctagaataatccattgctttaaaaacatgatttttacctgctttttagattgagtgttctataaaaattttttcttaagtgaaaaaaatatgcagaggctaatgtagactgtaaaatgaaggagaagcttagctttactgtggagtctgggtctgggtgtaacctaactagctagaggatatgcaattcctgattgacagcagatccagcattatgcagattttgtaagggagaacactcagctcagaaacagtgatgagaggctctgttaggaattactacattcactactcatatcttttagttttctgtctactggatttgtaaataaatagcacaaaacagttcctcttttgtttttattaaagtgatactgcaatgcagttcagtctgtcagctaggcatacatgtgtgaaatttgatattctcactaaattagctaatttttagctgtgttccatgcttatctctagacctttgtgtattaaatcctgtctcgagctgttccctttatacacaagtgtgttttgcttgtgccttcctgtcttcttcagtgagaagctttatgtaggtcaggcttggcttaagcagatttcctgaacctgcgtcagcttaagctggaggaattttaataaaccctcccctgtaggcgtgggcctaaatgaggctagcctagttaagcctgatctttttctgtttgtgaaaagagctgagcagagctgaaggctgcatggtggtttcagaaactgcctacytaatttgaaaagaacaatggtaggaaaggctagatcttccaattttaccttatccgaaaagcttgatttgctaaagcttgtgaagccrtatgtgaaaattctcgaagaacacactaataaacattcagtaatagtagaaaagaatagatgttgggatatcatagcagttaactataatgcaattggagtagaccgccctcctcgaacagcacagggcctacgcaccctttataaaaggctcaaagaatatgccaaacaggagctattgcagcaaaaagagacccaatcagattttaaaagcaatatttctgagccaaccaagaaagttatggagatgattccccagatttccagtttttgcctggtaagagacaggaaccacatacaaaggtaagctttattytgttttgttatggaaaattatggcgcctcctatctattgggctttggcttagtcgtgatagagatatgcatagtaagcatccccacaacgggagcaatgaatagtgtctttgttttgcattttttaaaaagagaaaagtgaggctatgaggaatttttctgttgcatttaagctactttttactgtcttcccctcccccttccctcctgtagtttctaaaagtaaaggttagggaggaataagtgggttgaaatttgtgacatcacttcataaacttcttaagctttaaaattaaattatttagtttgcttctgagagatactttttttctcatttaagattacatttcactggaattttcaattttatataaaatttatataaagttagcagtttctagagaaatggaaccttgcttttttatgaattgtcattgtctacacttattgaatatatgttaactaacaaatataaacaaaatcaataagtaaacttgttaatggcatgattgtgtatatgaagacagtttaaattatttttctaacacgtttaaaataaagatgaacacaactaaarggagttaatgcctaattagggattcagtttacttaataaaattaaaagttttttgttgttgttgtttttattccttaatagtctagtttcactttgatcttgggtcgtataggaaagagtaagctttctcttactgctttgcaaggatatcaaattatgaattttaaaatacccctaagagcaactgggtttttttagagttagaagcaattttttggttaaacttgtsttctatgtaactatttgccttggaattttcaaaagtattatcttgccactaattcagattgtaacctctggcaaaatataaaaatggcagctacattcttattctgaaccatttagggtaatttaaacaaattgtaaactccttgttagtttgaggagcctttcaaacaaagctttacacaatgtgcttttctattggtggaagaggcattatataagcaaattattgattactatgaaatccctttgaaattaggagagaagcagaaaaaaaccactttgtagccaagtgcatatgttattttggtaatttactaggaaagtatttttgagcctagcttcttaccmgatactgcttatttctacttgatagcacagtaaaaaaaatatcaccagtgggaatccaggacatgaatacacagtggattaattcttggggccactggttaaaatgttcactgtgatgacaaatgatgaaatcccaatagctagatatccagaaaactacgcagtaaaattgttttatactgtgctacttatgcagaattttctctcccttgaaccatggagaaaagtgttttttgcatcgcaggtataaaactgtaccctttggttagtaggtayaggtttttataatttgaaarcgacatgtagaaactgtaattttagttagttgcatattttaaaaataacagtgagtagaagaaaaataatatataaatatacaagtatctggttacattttgactatttgtgtgtgtgaatatttacaatattcacacacamaaaatcttttgggatatgaacatttctctgataaaaatgagttgatttgtacatttctatacctatggcttaaataataccaatttgttaggttttaaagggaagaatataagaaacatgccttttaaattcttatgttactgtgtctacattgacattttctctgtattagcttatttctttaatatatatatttaatgtgcttatatttatttgattgatatcatccttgaatcttaataatctcagaagtttataattattctataatcttaactatacttctacataaatatgcctgttaatcttaccaaactcttcctttttaataaggaaaatactagtgtttgcgttaacatacttaaaaatatatacctgttttgtaaggctatttattttctgtaactcacattgacttatgtctttatttttacctcttcctaatatcagtttatattttgtgtttttgtaaactgatcttcaaagttctgattctcaagtccttctctgtcatttttgtgacctgctctaaagctttttttctccctttttrtattgttatgccttagttgtaatgttttagctaaaatggaaaggaatgttccagatatraggcatatttttaatttacttggtagtattatgtctatgtttatactctctattttacatactaatttgaaatagtaattatgtggttttaaaaacttaattttcatatgcaattttagccttttcccattccaggttttagcagagctattaatagaagcagagcttgctactttgaattacatttataattaattgttttgtttttggaaataataaaatgacacaaacagagacaagaacaaaaatgaatttatataacctacaaatagattttttattatatactatatatgtttcattttgtctcttagataaatatctgatatttctggcaatttaatggcattagtaagtaacgtatgggtagttttaatctttttctatgcattctgcttgaacttgttccagcattttaatcatccatgtagaatgtattcttttaattatgtttcttattatatgtaaaatcttctctaaataatattaaataaagtatttccattcatgttcaatgatctaatttccctttataacttttatttttaagttaggcagaagcataaattaaaaaaaacaacctcaaggagcagatattcttaattcacagcttcacgttatacataaaattatgtttataaaacagaattttaaggtttattgcatttataatatcataacttgttatgctgaagcttaaattatgctaaagctgtagttgtctccattgggaatgcatatttggtggaaattatgtgtaaatttaataaacctttaatatatctgtataggccattaaaaatgtttcattaaaaaatcatttagtttgttttttttcagtcattcaacacataatgagcacctactaggttctaagtacagtacctgctaggtactgagtatacagttgtggattaaaaccattgctcttgtgaactttacctgaccagtgattgaaagacttaaacagcatctgagtcatatggttcagaataggtaaaasggaagtttttcctatcagataaaagcatctgaaataagaaagttaggataacctccagtagttgagcatatcccaaagccatatacaatctttatgttttattttttgggcaaatgcagaaatcagtacctcccatagatggcctttcactgtccttttataagttatgggccttcatggttttaagatcagtccaggagagcagaagcctgaggtctagggctaaggtatggggataacaagactgagaatgcattaaatggctctgtacaccatttgaaaaccttagggttgtgggaaagattggtgtctgtttgacaacatgaaaactggcttttctttttattttcttcattggccttctataatatttgtaatttcctgctcctttaaagcacaattttaaagttaaggatgggggagatctgtgagtatgtattattgaaatcccaatcttagtcactttaatgtatttcaagtgtttaagatttttttttattttgtaactttatagttttaaagctttatcatttaatgtacattaaattaaaattatgctataaatatacactttttcttcatttgatttacatattataatgcttttttgtgtgctatagtgcaaacttggatgaggaggcacaggctggtaccagttcactacaggtaatgttggatcaccatcctgttgctattacagtggaggtgaagcaagaagaagacattaaaccacctcctccactggttttaaattctcaacagagtgatactttagagcaaagagaagaacatgaattagtacatgttatggaaagatccttgtcgccttcactttcctctgttgatatgagaatgacatcgtctccatcttctattccaaggagagatgatttttttcggcatgagagtggtgaacactttaggtcactattagggtatgatcctcagatcctgcaaatgttgaaagaggagcatcagataattttagaaaatcaaaaaaattttggattgtatgttcaggagaagagggatggattgaaaagaaggcagcagctagaggaagagctactaagagcaaaaattgaagtggagaagctgaaagcaattcgcttacggcatgatctacctgaatataacagtctctaagtttttttttcaatcttgcaatttgataattttgattttggccaaattactttaatttgggaatatcctgaaacagaatacacgttcttgaaaaatgttgttaatctctattatggaaaaactttttagatataattttctaattattttcttttgagatattaaaatttactggttggttggcatggttatagtttttattgtcttcttttttttttccctaagtttaattgttgaccttacaaaagatattttattctgatcactaagatatacacaaatgcatatacaaacacatattctttcaaagttctgagtcttcaacatttttagttagaactttgaaagctataattagagatttttaagtcagtctaatttaggagctatactaacctaataccaagaagcttgtctgtatgacattggtttttatgcttttatcttttgaaggagtaaatcctaggattttagagatggaagatatttggagaacactttttttccatctctgcagtttaggggtaatgaaacaggtccagggagaactcartgacttacttagggtaacaaagctatttatggcagagcagagaccagcacttagtttttctttgtgtaatttccatcccgctattcgatagaagtaaatatccactaaaacattctctagatttaaatattagaagcatttctttcattaaaattgcctttaaagattgttaggttgtgaaatcaggataattacatcaattacccccattctctctctatttttgttccagcaaaatagataaggtattccattgaagctattatatattttggctgtgtgatttaaagacatgtcttaattcattttgaatgtsctgttctggaaaaaatttctttcacagtaaaaatcagaatgaacaaaattaaaattttatgtattttataagtattgttattttagtattcatggaaataaaacctcaattcttaaagcatacatattaaatttatattaaatctctaatatgtatgttacttaagaatttctatttttgctggggttttgttgagaagggatttttaagccaagttgtagaatggggtgggtgtaatttcagcagtgaaggggaccatgggtgtttgaagtcaagagtgagacgctggaaaaaagacaaaagaatgggaaaaagtggattgagtatataagcacaaatgcagtgctaagccattgattttaagtgaatgtagagagagtcaatttgggctgtagtatcctggactaggaaggacatctccctggactaggtagggtagctgctgtttagctccagcagaattttcacatgcggggataaaccagaaatctgcattttttaatgaggaatcttccaattttaaaatgtttgcaaataacacaaaatgcttttaaaacattatacagacaacatgtgagtgggcctcactgagccattgggcttccactttgtggcctttggagtagaccaatggttttccaagtatgggtcctgaccagcagcatcagcatcacttgagaacttgttagaaatgtaaatccatttccaagtgaattagaaaccctgggggtgtcagcaatctcttttaataaaccctttagcgattctgatgcatgctaaagtttgagaaccagtgaaacagagtattttggaacctcgcttggtgcctaaatcatactagtctcaaaatttttgtcgaagagtagttgaaagtgaactgagggatataaatttggatgatggttgataccagattatgaattacattaaatactttttttttttttttttgagatggagtcttgctttgtcacctaggttggagtgcagtggtgcgatgttggctcactgcaatctccgtttcctgggttcaagcgattctcctgcttcagcttcccaagtagctgggactacaggcgcaccaccatgcctggctaattttttgtgtttttagtagagacggggtttcactgtgttagccaggatggtcttgatctcctgacctcgtgatctgcccgcctcggcctcccaaagtgctgggattacaggcttgagccaccgtgcccagcctaaatactatttttaatgagtcagacttaacgtacaatgagaagccattgaatgctttgaattagagggctaatttgattatagttgtgatttaggaggagtggcatttagggacaggcattgtattggaagaacttaaatcagaaatttaagttatggctatagaaatagaaaaaaatgaactcaaggtactattttagcatgttgactacttaatttcattggttggattaaaaagagggtgttttatagctggtagagttaacttctttaattataaagatgtcctgaatatataacttgatatatccttttgacaatgttaccttttctctttaatctgtgctatgacttttctttgagtctaatgaatcttgtaattcttaatttgaggtaatgtttcccagtataattctagtaaacacatcttggcagtagtaagctttattttttgaaattattgaaagcacatatatgagatgtaattcactttacagtttcagcatgctactaagaattgataatgaatgttcaatttaaatgttggcttttacagcaaatcagagttttcccaagtgtgttctgtggaacattaattctgtgagatgtttctagaaaagagatctgtgttaaaaaaaagtgcagtatacatcttttttatttttggtggttaggttctaaaataattgtggaaggtaaaaattatgtatatacaaaatagcccttgaaaattcctttgctgcccataaaatagcataaacatagtctgctacaatcatatttttctgcagcattgtttaagattgctttttctttagtgtgttaggtgacacaattcattagcatttaggggctgtatacaataagaaacctatttttacatatttttaaacaccagaatcacactctttgagtttactgcagcaacttttccaagtcaatcttgtttttctccaagtcagtcttgtttacttttaatttgcaaaagtttaaatgcatataattctcctcattgtctacctccccttgtataaccatgattaacatagtatagtttatgagaattcctgtataaagaaaattatttatttgaccatagaatccttttccgaggctgtttattatcttacagagtatcttagggtaatttggaaccaaacctttttttttcttcttttttgtattgagacttttttgagttaggggactacttaccaactaacattagcagtttttgttgaggacaagtttcattaaggggaatatataggggaaagtttgctagtacaatggaatgtacacttggctttctatctgcaggtttcacatctgcagattgaactactgtggattgaaaatattcaggcagaaaaataaataacagtacaacaataaaaagtaatacgaaatttaaaaagacggtataactgaggtaggagttgggctaatccccagttttggggctcacttgtcctgtatcctaacaactatttacatagtatttacattatattagccattgtaagtaatctagagatgatttaaagtatatggaaggatgtgtgtaaattgtatgtgaatacaaacattttatataaggracttgagtatctgtggatcttgatggggtagggggtgtcctgaaaccaatcccccttggatacwgagggatgactatacacttaagccaccagacatcttgcataycatagacaattgtttggggtccatgagctttaattacaaaatgtaatgctgggagaacatagagaagagtgattttgttttttaaatgtagacttgattctgtagaaatatactacatttgataaatatrctaagtatatagattatttcatccaatatattagtaatttagatagtggatagccactttcctatctttctcttatccatatgaatgtaatggatatgttgttacaacttatgattttctaaactagctgtgatttataatgacatcctgagaaaagtcagtgaaactcatttctaacgaataccagatttcttaaaatagtcaagtatttttcttttgtgtatgatgagatattaacttggtgttatttcatttttttttttaaggagtcattctaccctgttctatctttacttatgtgaaaatgtttaaactatgagtttttttcatgtgccttcttttggagtaatgtcaacttttaaatacacatgtttaaataacttagagtgtaataaattgtgtttaatatatactgtagataatgatggttaaatgctttgttaacacatgttcttttaaatacaagatactactttgtactgatttgtgtactttttttgtgtgccgttaagacaaataattcagtactgtagaggtaaaattttttgatgaggtataattgaaatacatttatttagatgattatgttataatagatggccaatgtaccatatctaaatatcacatttcatttcttttttcaaatgttaagagccacagcttctcaaaatcaaatatttgatggtgaatttgattgtaaacacttaaaagtaattagatgaaatatggttgcatacttaaacaagagtaagttcttagaatatgcaatctaattaaacattaacagtcaagcaaaatctttgtatacgattttgagaaattgttcaatatatttttataaatcttttatattgattaaagctagtagttataatttgaacatattatttatttttagtttccaattgctttgtaatagtggaaagcaaaataaatgagtaaataaaaataaaaataaaaatatcgctcatatcagtcctgacaacttaaactaaaaggatatatcattataattccactttgctagcaggtcttttttgttttaaaatttatgtgtgaattcacctctgttacaaagttttttttcccctaacattaagaaacctttcaaacatacagaaaaagtgaaaagatagttatagtaagtatccatatatctaccacatagattctgcaattaatgttttgctatacttggcttcatcacctatttatccatcaattcttttttttaaaggaaaaatgttacttcgaaacaagttgtagagttagaataatttacccttaagtacttcagcatgagtattactagagttcactatttatttgtgcatgtgtgttttttaggtaagatttgcatacagtgaaatgcacaaatttaaaatataccatttggtgagttttgatctacaactgtgtagctcaaacctctgtcaagaattagaacaatatcacctcagaaagtcctctcttgcctgcttctaatcagtcttcttgcacgtcaggcaaccattgtcctaatttaaaaaaaattatagataagttttgcctattctagaacttcatgtaattggaatcatacaatatgcatactttgtttctgtttttttcaccttagtgtttttaatattcatccatgtttatccatcctattagtagctcattgctttctgttgctgtgcagtattccattgcataaatataccacactttttatccattatcttttgatggacttcttggcaatttccatactttggctattatgtataaagattctatgaatattcttgtgcaagtttttcatggacataatgttagttagggaaccatacagacttaacctttaagaaattgccagacattttctaaagtgattatatcattttacacttccatcaacagggtatgagttttttttttttttttaatttttgcaaaaggctgggcacagtggctcacacctgtcatcccagcactttgggaggctgaggcgggtggatcgcttgaggccaggagttcgaaaccagcctggccaccatggtgaaaccccgtctctactaaaaatacaaaaatcagctgggcgtggtggcaggcacctgtaatcccagctactcaggaggctgaggcaggaaaattgcttgaatctgggaggcagaggttgcagtgagccctgatgacgccactgtactccagcttgggcaacagagcaagaccctgtcccaaaaacgaaacaaaacgccctttgcatgttcagwgactggaatgtcagaagtgaaattgatgaataatttttgtaatatttaagtgcattcaaaatgttggacaggtaatttagatatctgggaatattgtagtttaytggtttttttttttttyattttagtactagttgcatatatgctctgacatgaggtattgaagaaatatgaaatgtgtagtctctgctacgcttataaaacataattctgaaaatgatctttaatgcaaagaaatatcttctaggtttattttatacttattgatacttatatttagttcacattcaatctcttagatataaraaaactgtgagtgattatcagtttgaagggatttgtatattaatgtttgtatgctttttagtgtaataaaaactgtttcaatcttaaatttatattgcagttatatgttaatgcatattaaacattggtaggttttggtaattttaaaactcaaaacatgatctgcaagagtatttacattctttattgaatttgattatatgagacattttaaattttcatttgtgccattgaaaacaatgtgtgtatttagaattgttaaacaaaagaatattaggctgggtgcggtggctcatgcctgtaatcctagcactttgtgaggctgaggcaggaggattgcttgagtccaggagttggagaccaacctgaagacctctttaaaaaaaaaaaaaaaaaaaaaagaatattaaaggcttaggtttatgggttgtacaattaagtcattcaactccagagtggctatgcttaggaatcattcactaagaygataatgcccactattaatattaaatgacattatttccctttatcaaaacatgcccttatgaattttttttttttttttttttgagatggggtctcgctctgtcacccaggctggagtacagtggcacagtcacagctcactggagcctcaacctcctgggctcaagcaacctacctgcctcaacttcctgagtagctggaaccacaggtgtgcaccaccatgccyagctaatatttgtattttttatagagacagagttttgccgtattgtccaggctggtcttgaactcctgggcttgagtgattctctcaccttggccccgcaaagtgctgggattacaggtgtgagccactgtgccagctgccttatgagtcttgcagatagaccttcaagtctcttgtttatgcygaccactttttggtattgatttggcaagcacattacagggtcaaggggaaaatagatcagaacccagtttacagttaagaaattatagactgggattgttaggggtggttattctgggacatagcaaattagtcaatattttctgtaatacaagtagtctagatataggaggttatgttccactattccatgttcccaacgatcttgtttttaccttttggaattattcaccctctctattccatgctgtatggcctacataattttaaaaatgggagtaattgagaaagggacaagggcaaatgttgatggtgtaaacattaagggagcacttactatgtggcaaatactgttgtgttttacatatattcactaatccttgctcacagtaggtttgcgaggtaagtattagtattatattcattttatagatttataaactggcacaaaggtgttaagtaacttatatagggtcatagagctagtaagaggcagacttaagactctgacccagccagtctgtctccatagttcatgcccttctgctgttctgcaaaagaaaagtgtatatccgagaatcttatggtatttcaaagttacttataagtaatttctgaattatcagaatttagttatcttgttcattgttttttctgggagctggtgggatggtggcagggagggtcttggacataacatccattctcttagaccctggtaatacaatacggtattttactccaggatgtttttcccagtcttttgatgaagacattctttttacccgctctttagggtaaaaggggaagtatgtttttctcttggataacctaataaaaacagagaaacacattttaactatgcagaaagattttgtcagtttttaattcaatgcacagtgactgctactggtagaaataatacaaaaagaaaactaattaaaattgactaaaattgcacacagcaaaatttgtgtgaaaagagttcaaaagctaattgaagtattctgtcttttgttaatgctaaaaacctcaaaactttatctgggaagatcgggcttggtaaaacaacgaaaataacccatgacagctacaaatttatctaaaaactggttaagttttcttgactaaaatttgttggattaatacgatcctgataatatttagctgtgcaaaatttgactcagtaaaacttcatttggtagaaattatggttatgaaagaacatgttcataaaagctttcaccgatcaatgaaataatatggtacataaagaagtgactgaatctttgctacaaaatttacttggaaaatgatcctgatgataacaagttttttttgtttgtttgtttttgagatggagtctggctctgttgcctggtctggagtgcagtggcgcgatcttggctcactgcaactccgccttctgggttcaagcaattctcctgcctcagcttcctgagtagctgggactacaggcgcctgtcaccatgcccagctaattttttgtatttttagtagagatggggtttcaccatgttagccaggatggtcttgatctcctgaccttgtgattagcctgcctcggcctcccaaagtgttgggattacaggcgtgagccaccgtgcccggccggtaacaagtctttgtcaatgaaaataaaaattgggtaataatggaaatgaggacagagttatattctaaagcaactcttaatgaaaatgaattttaagataaatatatatgtatatttatacatattctctttcccaattagtcccatttttaaaattatgtaggccatacagcagggaatgaagagggtgaataactccaaaaggtaaaaacaagatcattggcaacataggatagtggaacatagcctcctatatctagactacttgtattatgaaaatattgactaatttgctatgttccagaataaccacccctaacaattatatatatatatatatatatataattttttgtggtgaggaggctttctagaaaattctgaaactggatttagaattggcaaaaactggaaaattctgaaagagctgtaacactgataattttatatatatatatatatatatatatatatatatatatawatatatttttttttttttttttttttttttttttttttgagacgaagtctcgctctatcgtccaggctggagtgccagtggaatgttctcggctcactgcaacctccgcctcccggattcaagcgattctcctgtctcagctacccaagtagccggcactacaggcgtgtactaccatgcctggctaatttttgtatttttagtagagatggagtttcgccacgttggccaggctggtctcaaactcctgacctcaggtaatccgcctgcctcagcctcccaaagtgctgggattacaggtgtgaaccactgcacccggctgataattgtattttaattaaatgtttttataaacatttagtcaaaatgtacctagagtcaaaatagcagtttttgaaaagtatcttgttctgtgagtatggtgatgaacaaatcaaaacatactctcaggactttataagttactggggaaggctgacattaaataatttgttacataactaattattgagataatgttgaggtaatagggtaactagatctaatttggcaatcggaaatttaagttgtacagagagtagaagttaatttagataagggcattagaagaagacaggtaaaagtctatagctggaaatagcatacttccttcaagattactaggactcatggattttaagcaagagggatactttatcagattcacatttaaaaatagataactataataaatgtggaaaacggttttagagaatagaggtggcaaaagacgctgtcagtagacttgttgggaagcccctgcagtaataccaaaattcagatcagagatgagttgaaaaaagtggaggcaatggagaaggatacaatacatagctttgaaaacctggtagggggcagaattgtctggattttgtggttgattgtctgtgggactgaaaaagtagagtgtcaaggatgatttccagttttctggcttgtataaggacgagacatggggaaaccaaaggaggaacaatttttggagaaaagatacatggacatgatgagtttgagatgtttatgagatatgtggacatgtctgggaggcaattggatatgcagatcaagagttgtaatctgggctagagaaaaaaaggtttttagtacctgggcagcactgaatccgctcaagtggacaggctacttaaagagaagtggtgcacagtgagagaacagggcctagaagtcagttctgaagaactccaatagataaaaggtagatgaagtatgaactggcaaagatgtctaagaagaagcaagcaaagaggtaagaggaaaatttgaaggatgttagagaatctacaaaagtatagttcagtatttctaggaggaagtagtcaacattgtctaatgcttttgagaactttgattaggactaaaaacacaacctgtgggtttatagacaaagagttcctggtaacctttaacagggcagtttagggggaatgactactggaagccatattggagcagttaaggagtgattgggaatttgaagaagcagaggcagtgtgggggtgggagtgtttggatacttgaagtggaaacaatggggtagacagcttcttatggtaggaaaacatctcttttttttttttttttgagactgagtctcgcttgattgcccaggctggagtgcagcggtgtgatctcggctcactgcaacctccacctccagggttcaggtgattcttctgcctcagcctcctgagtagctgggattacagacgcccaccaccacgtctggctaatttctgtatttttagtagagacggggtttcaccatgttggccaagcttgtctcgaactcctgacctcaggtgatccgcccaccttagcctcccaaagtgctgggattacaggcctgagccaccgcgcacggccaaaaacttctttttttttatgtatgtgtttcttcctgcaatacatgtttctccctgaaatataacatattacataataatcttgactttatttttccatgctatgttttttccccatgatttactgtggagaaaggagtttattaagtaggaagtcaaagagtgaccttgttaagagctctttgggaggctgacgtagaccagacgcttaagctcatgagttcgacaccagcctgggcaaaatggtgaaaccctgtctattgaaaatacgaaaaaaaaaattagccgggcttggtggtgcatgcctgtagtcccagctactcaggatgctgaggtgggaggatcgcttgagcccaggaagtggaggtttctgtgaaccaagatyacaccactgcactccagcctgggtgacagtgagactctgtcttaaaaaaaaaaaaaaaaaaaaaaaatcaagttttctttggcgcttttactacagcatgtcgatatattgatttagagtacaatcatgttgcttaatgacaggaatatgttctgagaaatgcattgctaggtgatttcgttgatgtgtgaacattgtggaatgtacttcctcaaacctagatggtatagcctgctacacacctaggctgtgtggtatagcctrtggttcctagactgtaaacctgtactgcatgtgctgtgctgaatactgtagacagttgtaacacagtggtatttgtgtatctaaacatatctaaaaatagaaaatatacartaaaaatatggtattaagatgttacgggaccaccatcatatatgtggtctgtggttgatcaraaccttgttgtgtggtacatgackgtatactaaagtgtttaataatttctagtaagtgtgagtgggcttatttcaacctcttttattttactctgttaaattgttcatgttgctttttttttttttttttttttggkgggggccaggctgtgagagaagagggaggagtttttaaatgacctgggtttatttaaaatattgtaacagccccgtaacttagtacctcctattaaagaaaatattaaatggattcttaattcttccagcacagtcaacacttgtgttccatgtattttgtagcattttacatattaaaattcagtagatttattttttgctttaattttattttcatttatttatttatttttttgagacggagtttcgctcttgttgcccaggctagagtgcagtggcatgatctcggctcactgcaacctccgccttctggtttcaagcaattctcctgcctcaacctcccgagtagctgggattgcaggtgcctgccaccacgcctggctaatgtttgcatttttagtagagacagggtttcaccatgttggtcaggctggtctcgaactgctgaccttgtgatccacccgccttggcctccgaaagtggtgggattacaggcgtgagccaccactcccaacctttttgctttaattttaacagttcttactaattgaaattcttttatgcctattttttacttaaatattttaagtaaaattcagggattagattctacatattggcaatatgtcggctgaatgttgagggttttctggtcagattaaaactttaaagatatgagaatcttttctttttttctcaggtaccttctttaagtgtagtgtgaaattaggagagtctagcaaagaggaaatgaagatacatttaaaaatatcctatcactaatcaaattcaaattgcagcattaaggagatatcatttctgccaattaaattgataaagatgaattcacagaaaaagttcatagaagctttatgatagtcaaagctatcaaaattaagctgaaaactcaactgtctgtcactatcctatataataataaggaacaaattgttgatacaggcaacaatttgggatgaatcccaaagacattatgctgaatgggagaaatcatttttgaaacggttgtatactgtatgattccatttattcgacgttctcaaaaagaaaacaatattcatggaaaacaggtcagtaactgcaggggttttgggtaaggggagggtgtgagtataaagcaatagcatgagggagtctttcgggatgatggaacgattctatatcctgattgtggtcatggtggttctgtgaatctatatatgtgttcaaatttgtagagctgtacatcaaaagaaaaagtctattttactgtatgaaaatttaaaaacaatagttaaaaatggataaaggtgatgttttgtgctaatgtaggtgtaatgggtgtaatgaagtggacacccttgcttggtgggaatatcattgatacaacctttcrtggagaaaaatttgtcagtctaaatcaagaatctgaaaatctttaaattcattggactggtaatttcatttcttggactttatcttccacaaataaccagagatgcacagattgaatatgatagagcttaaaaaaaaagtccagtaataagggactaataatatgtagaaatatatccacaataacatatgaaaagagaagggtaaaaaactatccactacatctactgggacatttagaagcacatttcccccaaaaaagtatctgaaaaatgacgtgttatccatacactctcattagggaaggaaggtcagaaaactggaggagctgcacttaagtcctttgtcttcttggttcctgctgagggctctagcagactgaatcctttcaggaactgatcagagttcattgggtcatgccagacagagctgactcaagctgggtatgaatcatttgttttctcagaaaacaactttggtggttctgagtataatttactggttgaagatagccaagactcactttctaaatccatgaatgccagtaatgaagatacaatttatctgaattctagtagtgataaattttcaggcatttggcaggttgatttacctggcttggagatgtacaagtttttttttttcsagacatatgtcttctttttctttcttcytcttcttcttttattttggtgaatacctagcagtgtaatggctggttatggtaggtgtatgtttaacttttaaagagtctgcgaaaccattttccaaactagttgtactgtttgacattccttccagcaggatatgatattttcagttgctctatatctttattagcacttactgtggtcagtttttttttttttttaattttagtcagtataatcaagatgtggtgttatttcattgtgtgtgtgtgttttaaacagctttattgagatrcaattaacataccctatgattcagtcatgtaaagtgtacaattcattgttttttaatatagtcacagttaatgtgcaaccatcagaacagccagttgcagaatattttcaatacctcagaaagaaactttttacctttagctaccaccaccctgcttcctaaccccatccttaccctccagcctaagcaaccattaatctattttctgtctctgtaagattttgctgttctagacattttatatgaatggaatcctaaaatatatggcctttgtgactggcttctttcacttagcataaatgttttcagggttcatccgtgttttagcatgtattagtactttgttctttttctatgatggaattatattccattgtatgcatatgccacattttgtttatcctttgtcagytgaatgcacatttgggttgtttctacctgtcggctattattaataatcctagctataaacattcatatgcaagtttttttgtggacatatgttattattcttttgggcatatacttaggagtgtaattgctgtgtcatttggtaactcttgtttaattgtttgagcaactgtcatgctggtttttccaaagtgctgcaccattttatactcctaccagcagggtatgagggttttgatttctccacatacgcatcacacttgtttattatctgactttgcgattccagccatcctaatggttgtgaagtggtatttcaggtttttaatatgtattttctggatgactaatgatgttaaatatctttttatgtgcttattggttgtttgtatatatcattttctgaattgtctaagatttttgcctgttttctattgatttgtttgttgtcttatttttttttctttttttttattattattatactttaagttttagggtacatgtgcacaatgtgcaggttagttacwtatgtatacatgtgccatgctggtgtgctgcacccattaactcatcatttagcattaggtatatctcctaatgctatccctcccccctcgccccaccacacaacattccccagagtgtgatgttccccttcctgtgtccatgtgttctcattgttcaattcccatctatgagtgagaacatgcggtgtttggttttttgtccttgtgatagtttactgagaatgatgatttccaatttcatccatgtccctacaaaggacatgaactcatcattttttatggctgcatagtattccatggtatatatgtgccacattttcttaatccagtctatcattgttggacatttgggttggttccaagtctttgctattgtgaatagtgccgcaataaacatacgtgtgcatgtgtctttatagcagcatgatttatagtcctttgggtatatacccagtaatgggatggctgggtcaaatggtatttctagttctagatccctgaggaatcgccacactgacttccacaatggttgaactagtttacagtcccactaacagtgtaagtgttcctatttctccacatcctctccagcacctgttgtttcctgactttttaatgattgccattctaactggtgtgagatggtatctccttgtggttttgatttgcatttctctgatggctagtgatggtgagcattttttcatgtgttttttggctgcataaatgtcttcttttgagaagtgtctgttcatatcctttgcccactttttgatggggttgtttgtttttttcttgtaaatttgtttgagttcattgtagattctggatattagccctttgtcagatgagtaggttgcgaaaattttctcccattttgtaggttgcctgttcactctgatggtagtttcttttgctgtgcagaagctctttagtttaattagatcccatttgtcaattttggcttttgttgccattgcttttggtgttttagacatgaagtccttgcccatgcctgtgtcctgaatggtaatgcctaggttttcttctagggtttttatggttttagatctaacgtttaagtctttaatccatcttgaattgatttttgtataaggtgtaaggaagggatccagtttcagctttctacatatggctagccagttttcccagcagcatttattaaatagggaatcctttccccattgcttgtttttctcaggtttgtcaaagatcagatagttgtagatatgcggtgttatttctgagggctctgttctattccattgatctatatctctgttttggtaccagtaccatgctgtttcggttactgtagccttgtagtatagtttgaagtcaggtagtgtgatgcctccagctttgttcttttggctcaggattgacttggcaatgcgggctcttttttggttccatatgaactttaaagtagttttttccaattctgtgaagaaagacattggtagcttgatggggatggcattgaatctatgaattactttgggcagtatggccgttttcacaatattgattcttcctacccatgagcatggaatgttcttccatttgtttgtatcctcttttatttcattgagcagtggtttgtagttctccttgaagaggtccttcacgtcccttgtaagttggattcctaagtattttattctctttgaagcaattgtgaatgggagttcactcatgatttggctctctgtttgtctgttattggtgtataagaatgcttgtgatttttatacattgattttgtatcctgagactttgctgcaaggctggttcaatatacgcaaatcaataaatataatccagcatataaacagaaccaaagacaaaaaccacatgattatctcaatagatgcagaaaaggcctttgacaaaattcaacaacgcttcatgctaaaaactctcaataaattaggtattgataggacatatctcaaaataataagagctatctatgacaaacccacagccaatatcacactgaatgggcaaaaactggaagcattccctttgaaaaccagcacaagacagggatgccctctctcaccactcctattcaacatagtgttggaagttctggccagggcaattaggcaggagaaggaaataaagggtattcaattaggaaaagagtaagtcaaattttccctgtttgcagacggcatgattgtatatctagaaaacctcactgtctcagcccaaaatctccttaagctgataagcaacttcaggaaagtctcaggatataaaatcaatgttgtcttatttttaaactataagaattcttaggctgggtgcagtggctcacgcctgtaatcctagcactttgggaggcctaggtgggtggatcacttgaggtcacaaattcaagaccagcctggccaacctggtgaaaccccgtctctrctaaaagtacaaaaatcagctgagcatggtggtgggcgcctgtaatctcagctacgtgggaggctgaggcaggagaatcgcttgaacccaggaggcagaggttgcagtcagccgagatcacaccactgcattccagcctgggctacagagcaaaactctgtctcaaaaaaaaaaaagaaaaaaaaaaaagaataattattctggatacaagacctttgtcttattcatatgctgtgaatattttaccccagccagtggcttcccttttgtttttttaatggcatctttcaaaaagcaaaagttttaaattctgataaaagttgattaataatttttgatttttatgtttcgtgcttttgtattctaagaaagctttgtatatcctgaggttacaaatattttatcctgtgttttctattagagattttttgttttaggttttacatttaggtctatcattcattttgagttgaattttgtatatggggtgacttaatggttgatgtttatcttttccaaatgtgtatccagttggtttagcaatgtttgttgaaaagactttcctttcctcattgaatttgcttccctacctttgttgaaaataatttcgccgtatatgtgtgaatagttctatttcttgcttctcttccaatgcattggaatgtctatatgtcttttttggagaggaagsgcagtaccaaactatcttgattatcgcagcattattgtaaacatccaactttgttcttttcaaaaattgctttggttagtctacgttacttttatttccatatgaatttttaaatcaacttgccaattttactaaaaatgtcctgggattttgattggtattgtgttaaatatattgatcgttttggggaaaattactatcttaacaaaattgaatgttccaattcatgaaataggagctgtgcttatttataagagctttgttaattttttttcaacaaagctttttaattttagtgtagagatctgggttatcttttgttagatattttcccaagtatttcacatgtctgttttttggagctactgtgaatggaatttaaaaaattttatttttgattattccttgctagtctataagaatacagttgatttttgcatatgaaccttgcatcttgtgactctgctaaatttattcttctttatttttagattctctggggatttctatgtaaatagttamattatctgtaaatgctccggttttatttcttcctttctgatctttatactttatatgcttttgttgccttattcctatttaagtaagtaggaaaatagtaaaaaggaaaaaaaattacttcattttgtttttaaaattttattgttttgatagtttccatggttcaagtgtgtatgacgtaaaagacatagtgaagagctcttcagtaatggcgggaatgagattttgctgtcttcagctaaaccaccttttatccagccactgaaaatctagtgtgtgcaagttaggtgtaagaagcaggagacaacgtaattttaataatatttattctcatttctactttgctgttttatacttgttcttatttgaaaaagtaacatatcatatgatccaacactttcacttctgggtatatagccaaaaaaaaaaaatgaaattggcatgttgaagagatatctgcattcccatgttccttggagtatttttcacagtagccaagatgtgaagtcaacttaagtgtccatcaatggatgaatggattaaaaacttcttggtataggtacacagtagaacactactcagcctttaaaaagaaggcaatcctgtcacttgtgacaacatgggtaaacccggaggacattatgctcagtgaaataagctggacacagaaagacaattattgtgtgatctcactyatgtgtggaattcaaaaaagtcaaactcttagaaacagaaagtagaatgatggttacctagagttggatagaggtggggcattggggagatgttggtcaaaggatccgaaatttcagttaaggaggaataagttcaagaaatctattgtataacatggtgactatagttaataacaatgtatacttgaaaaatgctaagaaagtagcattttaaaaaatgttttcaccacaaaaagtatgtgaggtaatggataatattaattagtttratttagccatcccacagtgtatacatatatcaaaacagaatgttgtgcacctacatatatataatttttgtttatcaattaaataaacaaaaatttcaggttttactttcagagaactctgtaatctttgcctttcctcagyttgtcatgttacttaattaaatcagttttgtcaaaatgtgattttagatatttttccatgctatagacattgaaataatttcttaatttttagagttttaaaatgtttacagtgattattatgttattctacttcatttgagtttatttgacttcggaacagtaagacatttgtagtaattatactcatctggtaatattaacacctgatatttggatttcttagtttataaaatgctaacrtgagtatgatcaaatattctttcatactatttcttaatataatctaattttcttgtgccttttggttttgtttgaatgaccttactacttagacattaaagtcatttttaataatgtgtgttttttttttaattgtagttcattcggctcctaaagaagtagcagtgtccaaggaacaagaagagaaatctgatagcctagttaaatatttcagtgttgtttggtgtaagccttcaaagaaaaaacataaaaagtgggaaggtgatgctgttcttattgtaaaaggaaagtcatttatattaaagaatttggaaggcaaagacattggaagaggtattatgatactacctaatgtttacagtttggcctgaaattagtatgtatctccrgttacataattgaaatgtaattgggttttataaagagatgataaggtattctttaatggatgttcatgcctcaactgtgtataatacataaaataatctcataatggttagtgagcctgacaatcttatggtttatgctagctcagtgaagcaaatcctatcctatggtttcattttctccaaaaatggccagccagctatatatagttattttggtacttttctgagcttaaacactaaatttgacttggtatactttctctctctctctttttaagaatgctaagtggttaaaattgaaaaatatgttgatatcaagttgaatgatatgtaatttcagcactactcaataatgttttgaaaaacagagcaaggagataatggttaggcctgacctagattaacatatggaaattggaggttgccattgtttctgttacaaaatgttgccagcataatttgtagtaatacaagttaggctacaaattaagaatggctaacaccaactacagtgtctttgcattgtctcagttcaattttgagtgtgacctataactataaaatctgttctayatgtttatttacttaaaaatatagtttatagtttttaataactattatgtgccaggcagtatgctaggaataccaaagatgattataatttataatttagtgggaacaaagcaaagtaattgatgattaggaagcaataatacagttgtttcaatgagaagttttactaaatgcagttggagcataaaagaaccatttaatctgcccaggaagcagtgggagcataaaagaaccatttaatctgcacaggaggctaggggtaagcttgataggagttaccgtttaagatactatttgaaggatgaatagttttggaggttataggtaagggccatgtgcaagagagaatagcacatgtaaaggcacaaaagcaggaaggaattcaaactagttcagtgtttcaggaatgtagtgtatgaaaggccgtgacagtgttaagagttgaagcaaactaaattatctacaatagaatgttttatttattrtaaaaatatggaacaactgtgtatagtgattggggaagtaaaaagaaaaatakatagtacacattctatgttggttaaggtcgattggggctagatttttggagaatttgttcatgcattggtattgcctctttagtgaaattctaaagtcagtgagagaggaaaaattatcacaattactttggaatatcttttacccctaaggtatagtgtgcatggttttgcatatgtgtagtttataataaaatgatctttcagttgcaagtaacaaaaaatgaaaattaggcttaaaacagtgggtttttaccctgaccatgccagtagaatcayctgaggtgcttttaagggtgtagtggctcacgcctgtaatctcagcactttgggaggctgatggggaaggattgcttgaggctaagttcgagaccagcctgggcaacttagcaagaccttgtctrtacaaaaaaataaattaaccaggtgtagtggcatgcatctgtaactctaactacttgggagactgaggcaggaagattgcttgaacccaggagatcgaggctgcagtgagccttgatcctgccactgcactccagcctgggctggagagaccctgtctcttaaaaaaaaaaaagaaagaaaaagaaaagaaatgccgatgcccagactctgacctttctttgaggctctgatttatttggcctgtatggtagggagagggactgaacataggtatattttagggttttcaaaatgaaaatatccaaacataggacttggttgcttaattataacattaataaatgtattaacctgaagttaattttgcaagttactgtctataagcagtttttcttttaaataactgggatatacaatatgtaaatttgttaatgtaaagatagaggtgctaagaaaactgaaagctggaatgctaaaattgctaatagcttgtgataatgcatcaggctcagttggccatcattgcataatacctaggaaaaaaaaaaaaccagtatgtgaaacaaagtttaagagtaaaagaaaagcttctagcgactgagatgtttgaaagagtcacctttggatcaagatcatctatggatctaaatgaaatgagagatcttggaattagagctactttaaaggtacctcaaagttaaaaggttattcttgtcttccatttccatktaaaactgagattaacagtaattggattttatgtgaagataaaactataatcttcattaatttggataagtgaagaccaatactgatttgggatggagtgatgggtctttgacattgagctaagtaatttcttcctatatcagagcattacaattaaaaagtattccaccataaataatttaagactatatattaaatacagattggcacagattataaattttaggccagtttcagtagagaaaattttagtaattttcaactacttgaaaagggtcatcatattttctaaaatgtggcagtcttttattattatttttagagacttaaaagtttctggtatacacagctcctttgcttggtaatggcacaataactacacatttaatagtttaatgcatttaatagacaagcatggaagtctaaaatgccatctatgtggttagtgaactcattttaagcagcccatgactgacttatccatacttatatttcatcagcacctttacacagcaacacttaataaatgttcatcaaattaataataattcaaacaagcttaatattacaaaatattccatgttttattaaagagttagaacatggaatatctgtgacctcttgccacaactgtattttaactttgctatctcatgtggaacagtcagtactagttgtggtagcagttgcttttattgctagttctccttcacatttctagctgtttctaagtgaaaatagaggtaccatgatgtttctgtagtttatttacaagaaaggaggatacatatagcctatcaaactattttcttggcttaatttttccggacaagagatggcaaaactatagagtacaataatctatattttcaatagtaaaaaaattcttgctttctctaaagcatggctaatttgatagctgtattatttcttttgattttcaatgttttttttaaccaaaatgttaaattatgcttccattttggctaatgcattatataagactatttacattcaaagtgcagtttttttgtacagttacgggaaggtgaccgtggtatcatagagtgtcaattaatttttttctttcttaacttaaaggcattggttataaattcaaagagcttgaaaagattgaagagggccaaacactgatgatttgtggaaaagaaatagaagtcatgggtgtaatctctccagatgacttcagcagtggcaggtgttttcagcttggaggaggaagtactgctatctcgcattcttctcaggttgccaggaaatgtttctctaaccctttcaaaagtgtttgtaaaccaagttcaaaggaaaatagacagaatgatttccaaaaytgcaaaccacgccatgacccatatacgccaagtaagattttaaaaataatttgaattttctgtttttactgtcaaaatgttttttgtgtgtgaatttgaagtttaaattttgttttaaaagttttaggtgaaagtatacattattcttgagatatataatctgacataagagataatgttgaagtcaaataacaatatagtttgggaattatttcatatgtaaatgaataattctaagaatacagtaataaaaatactgtacatgtgttgaaggaaacatatctaaattgtatrtgtatacattacacatacatgtgtataattttgaataaaatctgactttttagtaaggagagaaattagtaaatgtattaatctggactatgattatacttctaatttgaggactgtatgccttgatcacaagcattagtgtgtaaaaatattgaatggtaagatttcatgcaaagtccaaattttactagtgaaagttccattcaatcagttaattttcacactgatgaatgcaattttaaaaatcayrttaaaaaaaaagaaacctagattgtatctgattgttcttttgactgttcactcagcaggtatttcttgattgccttttatgggttgggcctaaagataaaactgtcatcacagagcttctcatttggtgaggggaaggacaagtaatccgaatcaaagtatagtgtagtagatgtgaaagttgagacatagaggtgacttctttcctcacaacagcaagtatataaagtaatgattatttttccccattgcaagtattatggaaacataagttttgaagtaaagaggcctttgagatcatttagattcgtctcttcactttgcattggagaaaactgaggcccaggaagatgaaccgacttacctraatacaaataatcaacggcattattgggacaaaaccccacaattaaaaattctkagttctatattagcttatcccaaagacttagttgaaatacaggcagtggaagctgatgcagctgaattttctctttttgtccaaatattttgtctgtcccaccagctcttttaacaatccccmtcctctttattctcctttctctttgtacttttactattacacaatacagggctgtggggaactgaaaagaatactgtgcttattcagagatctgagtaagaatcatggttttgccactgaactaactggttctttgacctcttgggggtagtcactaaccttcctaatgttttgcctactcatgtgtaaracgtgggtcctaataaccaccgtagagatttagagtgtctagtatatactctttccaggaaatacttgttgagtgagtgaatgaaacattttattgtggcatttatgtgttgtgtgtatgtgatgtaaatgtatatatatgtgtacatgtgaattttatatatatrtgtgtgtgtgtgtgtgtgtgtgtgtgtgtgtaaaagcacttcaggtaaatagtaaatggttaattattcttatgtatttatcttagccaaggatagaattaggttgtagactttaatgcctcagacatgttgttaatattaaatgatcgtcttcatcattgtgaagataaagaaacatcttaaaatttgaactagtgttctatgattttgactgtttaggtttctctttcttgaagatgggccttttattaggtgatttataatcctatagtcctttttgcttgggcagtatgtgatttttcacctctatcttctctttttccttgttgtcctttttaaaagatagaaaaataacggggccatttcttgactggaaatccacaaggagcacactcttactttgctacagtgatatagaggaaagccaaggactacatttcccatttttacttcctagtctcctacctaacaggaattgacctcaaagatgaaagttcatttcagttactcagaaacctaggaagatccasagaaaacttaccctctgggtatttgttaatggtaaacatgactaaactcttattcctgtgacagtatagttccacactgatgaatatttacatagtctactggagtctatttctttttatctcctcttctcatctcctcattcttytttctttttttatctaattcaatttttataaacatgatgtaggcmtgcaaatatatccccaaaataattttggtgggtttattatctaatttcagatttatcaattgagacctgccttctagttatatttgattttgcctttttgggtgatattttagtaaatcttttaaattgtgttagcatagttttgaagaattacattgttattctatgatgacttcatgctgctttaaagaggttcatgaggctgggtgcagtggctcatgcctttaatcccagcactttgggaggctgaggtgggcagatcacttgaggtcaggagttcgtgaccagcctggctaacatggtgaaaccttgcctctgttaaaaatacaaaaattagccgggtgtggtggcgcgaacctgtaatcccaggtacttgggaggctgaggcacgagaattgcttgaacctgggaggcggaggttgcagtgagctgagatcacaccactgcactccaccctgggcaacagagtgatactctgtccccagaaaaaaaagctttatgaacttgacattcatgaatgtagtaattaacttcaagcaaataatggtggctaagtcaatggagaatttatcattttttctcagttctaattaataggagtaatgatcattgttagtgtgtttaggactgaaaagatagaaagcctgtatgttaaatttggggagacttttcagaatgagaagctgtgaacattggcaaatgcatcttggcaaaattccaacctgtactttcagttggaaatagttctctttgctctgaatactgaactattcaatgttgtggcttattgaattccttactagacaatagtgaatttcattgctttcgaagcacttttgggtatatgaagtttggaaggctcttcgtaattctttgcatgaaatcgttcatcagtaaggcatgagattttctttttaaattttgtgcccttgggtaacattactgtgactaaattttggacttttttggccacaaatgatggcaaacatttctatcttagggtaatgaaaacaagataatgttggttgctgaaaaagtgaaattacaatacttgtacttttatcattttttaagattccctcgttatgccacgaccagataagaatcaccagtgggtattcaataagaactgtttccctcttgtggatgtagtgattgatccttaccttgtatatcatcttcgaccacatcagaaagaaggaatcatattcctttatgaatgtgtaatgggaatgaggtaggaaaataaatcatttgtttaatctaatctgaattttgatttaacctgtaacacaataatggttttctaagaagatcctaatataatgagtcctgagggtacactatgaatttcaattggtaggaaaggtgaatagtgcttactgtgtgcatttattccaaaagtggttcttgatagatgccacgtgccaaacactgctaggaggtgggcatatgggaatcaggaccacggtccttacttttaagtggcttttaaagtatttgagtaaacagataaatgcaattgaccttaatgtggtataataaaagcttaccgactgctagtgtggtaaagggtcataagagcaagtgaaagaggcttttaattctggttataagaatttttttttttttttggagacgragtcttactatgttgcccagactggagtgcaatggcgttatcttggctcactgcaatctccatctcccaagttcaagtgattcttgcatctcagcctcctgagtagctaggattacaggcgtgctccaccatgcctggctaatttttgtatttttagtagagacggggtttcaccatgttggccaggctggtcttgaaytcttgacctcaagagatccacccacctcagcctcccaaagtgctaggattacaggcatgagccactgcacctggttatgagaattttggaaaaagattttcttctgtctctacatctgaaaatagaaaaaagtttcttcttccyttttgcattttctgattaaagaatagtagtatcttaaagatattttagaggacacaaaaaaacaggagaaaaaaagaatcaaaggcccctgctaacatttcttccagtcttttttgtttatttgttttggttttgttttgccttgtttttaaatgccaagacccttgattttaaaatttgtcctttaaaggtagttggaaatgaaattctccccaactctaagaactccttgaatgatgacaagttaagggaatactgtcttccagaaactgttaactagactcatatttcctcccaaatctgctttttctttcgaaggtcttatctcagttggtctgtgaatcatctttgatttcttctctctcacattctgaatctagtcaaacctgaacttttaattattttaacctcctaaatattgtttcctaatcttttctgtcattccactgcagcatctctagtaaccgatgtcataaaaatatcatattttatctagactattgcaatggcttctaacctgtatatttgcttctgatgcttctcaaataatgtattctacttaaagccaccatcttgagttttctgaaaaacagttctgaacatggcattcccttatttaaaatcattcagagactctcagaacttagaacagtgtttcccaaactgtgatccctactccactggcagtatatgggaccattttgaggtggcaagtggacaagcctttaaaaaaatttgaatagtagcatatttagttaattattggaaaaataggctgggcatggtggcttacacctgtaatcccagcattttcggaggccaaggcaggcggatcacttgaggtcaggagttcaagactagcctggctaacatggtgaaatcccgtctctactaaaaatacaaaaattagctgggtgtggtggcaggcacctataatcctagctactcaggaggctgaggcaggagaatcacttgaatccaggaggcggaggttgcagtgagccaagatagcgccactgcactccagcctggatgacagagcaagactccgtctggagaggaaaaaaaaaaaaaagaaaaatagcacattaaacttttggtttcacagataaattatgcttagaaagagttttcttttcaaatttaagttaaaatgatttgaagaaaaatcataaataacatatagtatcacagatatgacaacaaatcgtgatggtagtcatgaaatactggtgtttgggagatgctgatatataagatacagtctaaactctcaaggttaagtatcctcatcttttgtcttctacctgccgtgctagcttcatatttttcagttcaagctccaactatattcagctgcctaattagtgtagtaattatttaccctttacaattttgctcaaggtacatctccataaaggcttcctgtttgctcccttctctttatcrtgaaaggatgaatctggattttctctttgctattcactgtatctcattgggctgacatttggtcctttgttgccaaagtattgatctaaaacagccacctaaatagtagccgtaatttatgttggtaatttttttctctataccttgaaatggaacacatatataaaattgcatattggttcttaatttctactaagaagaaatacaattaactgacaaactacagttgactcttgaacaactcaggagttaggggtgctgacccactgtgtagtcaaaaatctgcatataacttttgcagaaacttaactaataaactaccgttgactggaagccttactgataacataaacactcaatttacacataatttcatatatgtattatatactgtatttttacaagaaagccagaaaaaagaaagcatgaagaaaaccataaggaagagaaaatgtatttactrttcattaagaggaaatggatcatcataaagctcttcatccttatcatgttgagtaggctgaggaagaggaggaagaggaagggttggtttkgttgtctcaggagtggcagaggtggcggaagaggtggaggagatagaagggaggcaagagaggtaggcacactcatttataacatttattgaaaaaaacccatatataagtggactttcacagttcaaacccttcttgttcagtggtcaactgtatacttatgtattttkgtaatatccttaattcccttggactttcttaactttaaaaatataaaacatacacttctaaggtctttaaaaatataaagtggcataaaaatacatggtcttactaataatatctctaataacatttaattttaaattatataacagtaggtctgtaggataacaacttttactaaattatrtgtattatatcaagtgtttagtgtttaatttttttatgatgcagggagctatttttgttgaggacttcatttactgacagaatcataaaatacagctcagtagatcttgctgattaaatataatacaacaatatattttaaactgttttgatatctgaaaccaataaaaatcactcaactcttagtgatgagaaacacagttatagttaaattatccatatgcagatataaaattggaattcatttctagcctctaaatatgtacatgtaatagtagcagatgatttagattcaactctctaatttcagatttatgttttggtaatttagttgacaatatgtaatggatataattatcaaagatgcaaaagatgtgttgtaaatcagctaatgaagtactaaaagtcttcagtgtcattacaaaatatcagtttctggttcttgatgattttaagagcataaaatatttttctattgtgattaaaggaagtaaaattatttctaacagaatgaatggcagatgtggagctattcttgctgatgaaatgggtttagggaagacattgcaatgtatttcrctcatctggaccctgcagtgtcagggaccctatggaggcaagccagtaataaagaagacactaattgtcacacctggaagcttggtgaataattggaagaaagaatttcaaaaatggctaggaagtgaaaggatcaagatatttactgttgatcaggtaagaaacttaaaagtttagccttagtcatttaaaaaaaatctagtttttcaaatcagtaattcagtttttacttgttaactccctaacccttttgcacaaaaatggagttttagcttacattttggttttgagttgttatggactgaatgtttgtgtcccccagattcatatgttgaaaccctaactttcaatatagcagtattaggaggtgggcttgggaggtarttaggtttaaatgaggtcgtgagggtagagccacgtgatgagattagtgcctccgtaaccagagcaagagacaccagaacttcctttctttaccatgtgaggatacagtaaaaagcattcttctgcaagccaggaagagggctctcaccagaacccaaccatgctagcaccctgatcttagaccttccaccagaactgtgagaaataaatgtctgttgtttaagccacccaatctatggtattttgtttatagcagcctcagttgactaagacagaaagagttaacacattccagttcttagtaagtgactgtcaggaataggctgcttaaatttgatttcatatagtttctgttcctgatttttaaaatactatcttttttcctcaggaccacaaagttgaagaattcatcaagtctatattttattctgttcttattatcagttatgaaatgttacttcgttccctggatcaaattaagaatataaaatttgatcttctaatctgtgaygaggggcatcgtttgaagaacagtgccattaagacaactacagccctcattagcctttcttgtgagaaaagaataattctaactggtcagtattcagtttggggaagatattttggaatttttgcctagtgaacatacagacttgtactatratgcttaacattcaaataactggtggtgttggatggaatttatactaataaacctgtgttaattaactcttggtaggattctgaatcttcaaatccatgtgtaattttctgtagcccagactttggagttttttaggaataaacacaatgatatcatgataaggaatttaggagatcagactggattgcttgtgcttggttcccgagtctgacatagctgtacaacttggagcaaattatttagtgtctctgtgcctcagtttttttaaatctctaaaataggaatgataataccatctaactttgtagagttctcatgagggtcagaggagttaatcaatgtaaagttcttgggaaactacctgacacgtggtaagtgtttaatatcagttatttataactacctgacatgtggtaagtgtttaatataaatatcagttatttttatatgtatatgctacatatgcatggtttattgttggacagagcttctggacccaactgtctggaaaggtggaatggatggtaaatacgagaatcctcttctacctttttatttaaggcctagactggagtatgatctaagtagctcaatgtagcttttctcccatatctcatcttggtcttgtatggcccttccactttgccgttgtgtcagcagaataaagaagagaattgtattcattactaatatttacaattcccctattttctacttggggcttcattttccctaccatcttcagcccttttggaaggaatggtcaggatatgattattcttactgtgtcatcgtcattttttccttcatgtgtcgtttatgcatgtcacagctctctgaagttaaatgaagagagagaaggagtatgaccaaaaacttgtacctccttcctatactgatagggtggaaatatgccccagaacaacagagaggagaaaactcctcctcttctgttcttactgtgttggggtggggaagactatccacctttaagaaattcctcatgatttgacttccaatttgtataggaggattgtattaaccattatcaaaagcgatttttaaartgatctgtgctttaaaaaaatgattttgggaaatgctaaatgacctttttattttttgaatttaatcacgatgataaagacaaaaggactagggtcaaatttcatagttatacccccaagattttctggatgcccaatgaatgtttgtcartaatagtgaagtggaaaccaaagaataggaaaactagtgttgaatatttataaaatgccatttttaaaggaaaaaatgagtcagggaaataggaaccatactctgaatgattttcatatctttggctgtttgagaagctgagtggattcgttatacttgatttccagtgctgcagttcagatttctttactggcctttgatcttgagatcactggagccagaaaagtaatgaaaaaaaaaatgagttagctgaatttagtaacactgagttagaagagaaaaagactgtttcttcttactgcttaaggatgggggtcagtattgcttatttaaagaatagttgcagatataaagtaaaaatgtttagcactagaagggagaagaaaaataaataaaaaagaagagtgagaaataaaatatactgaaaagtactgaagataagaaataaaagtagttcccttcctcacttgaaaatcataattttctgtagcaaaaatatataattttattgatatactcaatgataagcaaatactaatttaacattccaaattaaatttaatctgcagtagaaaattgatctaggatttcattcaacaagaatgtcttgatagcaaccagtgagattgtttcatttgaggcattagtattgtcctctgtatcctttgtcaatcttagcttgtttctgttttgctgtccttatcactcttatcccctgagctatgaatttaggtaaaaactagccctaactaacctttttaatttagaaatactcatagttggtttctgtattcttagaattgcctgaatgaagtctttgcttttatgggcaggacgttttaccccaagatgatttgttccttattatgaaagtacatgtttgtataggagtatgtacagtgatatatacatgataggtgctcaataactaagaatcaaatgaaaataattttgattttgtttcctcatattatctagcccagtgctgtggagttaatatttactggaaaatggttaggattcagtttgattgatagaggggtattagtcttgtagcactgccatagcaaaagaccacagactaaacaacagacatttattttctcacagttctcgagactggaagtccaagatcaagatgtcagcaggtttggtttctattgaggtctccctgcttggcttgcagagagctgccttctccctatgtcctcatgtactctatcctctctgcaaatgtattcgtggagtatctctctctcttcttagaaggacaccagtcatattggattagggccccatccttaggacctcatttaaccttaactgccttcttaaaggtcctatctccaaaaacagtcacattgggggttagagcttcaacataggaattttagggagatacagttcagcccacaattaagagctgaatgattattataagatcttcaatgccctttcattatatcatagaaaagataaatctgagattaattctttactgttataaataatgtggtgatgartatctacaagcatatactctttgtgtatagattcctagaagtgggcttataggattaaaaggaaaaatataaatgtgtataaaaagctctcagagctttctgtggaggttacaggaggatataggtgtaggttattgacagtgttgggttgggtggtagatttatttcttttttaaaaaaacaaaccaaaaaacaaagaaaaagcttttttttttttgtagggatagggtggaggtagggaaaagaaagagtcctttcattttctcagaagtttctttcccatactcttgaaaatagtcttagtaagtacaccaacttgacttgaaaatctttagttttttttttttcttctacaggttttacctagtctagaattagagcactgaaatagcaaatggggatctaaattaccactagaaagcaatgtgacaaactcttacaatgatgctatactatacaattggttctgtcttgtagccatattccccttctcatctttttccccccttccttactctttttccttcttcttttctgccctaaatcctttttcctattcccttcttgtgttctgcttttcttcttttgtccagttttgttcttgcctcttccctttgtatatcagttgggatgatttcagatgctggtaacagatgatctgaatcagatgtgcttattcccccatataactggaagtctaaaggtaggccaggctacaacaacccaacgttgtcatcaaggattctggttatgtcttctgctctgccatatttggtgttggcttcatcctcaggctggtagcaagtgactgcagcagttccagacatcacagctagatgtgatgatatccaaaggagaacaggactggctcttcttgtttctctgtgtttaagagggactttcctcaaagcccctctgtgatgacttctcatgtctcattggccaggatgagtcacatgctactgatggaacttcttggtgccctttctagctctccttttctgggctgttgtatccatcctttagctgctggtactattgattaaacaacttagaaccccttccttttctggagaattatctttgattgaatgagagctgtattctcctctatagtttgcaatcaacgactgactgatttaggggtaagcagcaaatggcagctcccttgccttagagtgatttcaggaccaacgttatggtgcagtttatgctctagagctccctgtaatttagctcaagctaaattatagctgaggccattcttgcttagtttcttcccctaccattttctgattccattattccctttctcctgagagctctccctctgtaaatcacatgcaaacaaatcactgtcttaggctctgcttccagtgaacrcagtatgagacaagaacccttgmgtatgtcagtcatttgcaaaggaggggacagaattaccatgattgacttaatcatttggggtttgatgaatgtctgaaagccaaccacagtgatccttctaccgttctttctcgtctttcctatactccccaatctttgtcatcatcatgcatattcttttagaggcttaactgaatatataccaacataaatgtatttttcccaactctttcaatgatgtgtctaaaaatttaaaactgactagatgtgttaaatttaaaaaaattagcaattgctggtccaacctgggggtggggaggacccattaagttttagggaggtgattattaaattccttgacattaaaaaagttatgtcatctatcttaatgaaataaatgcatttttatttacttttcacattatttatatctttggacaacattttctaatctcttatttgaaagccatctgatattacattgtttgtgctgatttatatgttcttttggcactattataattattgaaacatgctaatgtttctttgaaaattagcctaaagctattgcatactatatgtaatatatagaaggtatatgaatccattacagtctgtattaaccctttggatggtgaagatcttaatttgatctgataactttgaaaggtagtaataataggtgccattcaatgagtgtctactgagtgtcaggcattttgctgggtacttcatatccattgtctctactttccattataattattctgggaatttattatctttatacgtttataaatgaaaaaaaaaattctgagtttaaaggacttaagcagtttgtccaaagtcacacagctataataacagtaaaattactaaagttatagaacatttattatgctgtaggcaccattcaaagtatattatatggattgactactttgatcctcacaaccctaggaacgactgttattatctgcattttacagaaaataaactggtgtaaataactttctcagggtcactcagggagtaagtgatgcaggtaggatttgaacctaagcagtcagactccactgagcctgcactcagtctctatgctatactactatgtaagaacttagtatgcaattaaaaccagagttaaaagtttatgtggtgattaatatgttttaacttgctttgactgctctttcttagttttaggcaatttgcttgtatttattccttttagggaataaatttctccaaacttccattgtggttttgctataaacctgagattgtgattgtaaaacacaaacttgaccttttactcatttttgtctctctttaggtactccaattcagaatgatctgcaagaattttttgcattaattgattttgtaaatccaggaatattaggctctttgtcatcttataggaaaatatatgaagaacccatcattttatcgagagaaccttctgcttctgaggtataatttactctaataaataggtttttaaaaagccgtatgtctgaggaaatcatccataacttcatattattttgatttagaaaaatcaatagtgtgaactctttatttttctccacaatccttcgtttcttgcattccttattttagaatatgacatcacttgtctaaaattcatgaataggaacttcacaaagaattatgacaataaacatataaaaatgttcatctttactagttttgaaaaaagtagaacaaaataaccaaagtgacttttgtacttttctattggtgtgtgtttgtttatttagagatggtgtcactctgcgttgcccagtctggccttgaactcctggagtatccttttgcctcagcctcccgagtagctgggactgcaggtgtataccacctccccaacttggatttactagtagtagcaagtgtagacaagagtctcctatttggaatgtaaattgttggttggaatgtaygttggcacaacttggggaaagtttggcaatgtatatcaaaagcattaaaattgtgtatatcttgtggcctggcaatactccttttatgaatttattataaaaaaaagtacatttatttaaaaacttagctggctgggtgtggtggctcattcctgtaatcccagcactttgggaggctgaggtgggtggatcactaggtcaagagatcgagaccatcctggccaacatggtgaaaccccgtctctactaaaaatacaaaaattagctgggcatggtggcacatgcctgtagtcccagctactcaggagaatcacttgaacccgggaggcagaggttgcagtgagctgagatcatgccactgcactttagcctggtgacagagtgaaactccatctcaaaaaaaaaaaacaaaactaaaaaattaaaaacttagctatarggtatagggtgaccttatgtctaccaaaaaaaaaaaaaaaaaaaaaaatcagccaggtgtggtggcatgtacctgtggtcccagctacttgggaggctgaggtgggaggattgcttgagcctgggaggtggaggttgtagtgagctgagatcacatcactgcactccagccctgggcgacagagtgagactctgtttcaaaaaaataaaacgaaataaaaacttagctgtaagggtaaaaaattagaaactggctgggcacagtggctcatgcctgtaatcccagcactttgggaggctgaggcaggtggatcacttgatgtcaggagtttaagatcagcctggccgacatggtgaaaccccatctttactaaaaatataaaaattcgccagatrtagtggtgtgtgcctgtaatcccagctactcaggaggctgaggcaggaggttcccttgaaccygggaggtggaggttgcagtgagccgagatcgtgccactgcactccagcctgggtgatagagcaggactctgtctcaaaaacaacaacaacaaaaaagaagcaaactaaaggaaacacaaatgggaaacaaacatttttaaaggtaggacaatggttaaattatggtctacgtgttgtatacagactatatttcattgactctaagattctaccaattataggatatatcattattttgttatttaggagactgtgacttcacttaattaaatggttatgctaaacatataaatagatcatggttggtttttctgtccctatactcatattttatttcttttaaaatttgttgggaagcaatgagtaaatggtttatcattatgaaatctttaatgttcattttaagtgtatttttgtctataacactttcatttaagtctgctatttttccataggaagaaaaggagttaggagaaagaagagcagctgaacttacttgcctcactggactctttatccttagaagaacccaagaaattataaataaatatctcccacctaaaatagagaatgttgtcttttgccgaccaggagcactacagattgagctttatcgaaagctgttaaattctcaggttgtcaggttctgccttcaagggttgttggaaaatagtccccatctaatatgtataggagctcttaaaaaactgtgcaatcacccctgccttttgttcaactctataaaggtaagtgcatagtatctgaaactgtgtcagggatatgagggttctatagtatatgaatctaagagggcagacagggctaatttctgaggttgcatttgtgggttttcaaaaagctctgctggctatctagtatggttctgctgtagagcttatccagcctttcatttgttcttcagagcatgtccacactcctagagctgaagtagggaagagatgagtttgaggtactgccttctatagtttgtgcccaatcccctttggcaccttatctaatacttggcgatcgtctcccttcctattttatgttaatatagtctgtcagttttgtttgtttggtgctgacaaatacaaaatgtgccattaaaaataatttatttttttctcattttgaaagtgatacatgattgtgcataaaatttagaaaattcagaaaatcacaaagaaaataaaaatcatcttaagctcaacccatggaaaatcacattttggtattaataatattagctaacagttattaagcactaattatatacaggttgagcattcctaatctggaaattagaaattcaaaatgctccaaaattcaaaactttttgagtgccaacatgacatcacaggtgggaaattccatacctgacatctttgctttctgatgttaagtgcgcacagactttgtttcatgcacaaagttattaaaaatactgtataaaattaccttcaggctatgtgtataaggtatatatgaaatataaatgaatttcgtgtttagacttgcagcccatgcccaagatgcaaatattccaaaatctgaaaaaatctgaaatctgaaccacttctgttcccaagtattttggataaaggatggtcaacctgtaccaatcactaagtgctttattagtgttattttatttattatttacaaaactctggaataagtactagtattaccatccccatttttttggtgaggaaataggggctcagatatatatgtatatatgtatatatattatatataaaatctmtatatataatctatatatatataatcttattctggagaaacttartgatgctgtttatttatttgtttatttatttattttttgagatgaagtcttgttcttgtcccccaggctggagtgcaatggcatgatcttggctcactgcaacctccacctcccacgttcaagcgattctcctgcctcagcctcccgagtagctgggattacaggcgcctgccaccacacccagctaatttttgtatttttagtagagacggggttttaccatgttggccaggctggtctcgaactcctgacctcaggtgatctgcctgcctcgacctcccaaagtgctgggattacaggcttgagccaccgcacctggccctttttatttattttttttaaaaatatttattttttaaaaaatagagatggggtctcactctattgcccaggctggtctcgaactcctgagctcaagtgatcctcccacctcagcctcccaaagtgctgagattacaggtgtgagccactgcgcccagccgcaacttaaaaaaaactgattctatatacagtgataaaaatcaaaccctttgggcatgaagcacggtaaaaatagccaaaaatttcttcattaaaaggaagaccttatgatggcccagagtataccagttaatttagaatatgtttgtacattcttgaagaaagcagcagggggctctgagtgtttctccattgttgccatgcagtcactaataataggcataggatacttcaaatagggtacataatttatagtctgatatttattcagaaaagccttttctctaacttcatagcaaataaggattgatataaaagggcagaaatgagccttctacatgtataaataacctttaagcaatggyttgtaactatgtttctattgaaactaaattgtttcccaagttcaattaagatgttaggtctttctttaggaaatgtgagtggaacgtaaccagtaacaatatcataactcataattgaagtgtacatggagtcagaagagatagtgtcgcgattagcttgagatgagaagtcaaactggtaaatctctatgatggagatgctgcatcaggctgtcacagtataaagatattatctattggtcaattattaattagtggtacatawtataatatcctgggaagctcttaaaattacattagtccaggcctcaacacatatggattaattcagagtttgtttgagagtaggacccaggcatgagcatttttaaaaaagccttttcaagtgattctaatacgtgttcttggttaagaacttgtgcattaagatcgcccgtcttggccagggcggtggctcacgcctataatcccagcactttgcgaggctgaggygggagaattgcttgaggccaagagttcgagaccagtctgggcaacataatgaggccctgtctctttaaaaaaagaaaagatcacccatctccctgtactctgatttaatattcaccagacaccttctgttagtggtttgactttccctggggacgttctttcatrggacagaatgcacgtgcatagactgattggtctaaataggcaggtctcwtaggtcaatacattttcattctgacttattcagtctcttaatttggttaatatgaataatttccctagagcttaagcatattcaagtttctgaagatgaaaaactgtatactagaccctgggcctgtggtcctttgatgatctttccaagttgtaggcagagctaacctaaagcagccagcagctacttctttctcctcatatgtcccagtgatagaaatattttagagttcctagtatttttaatcaaatgactacacctaaatattgctgtattttgacagtaagccaaattaaaattagtactctgtgcccagcatttttatacatttcacataggattcactgcccttaaagtgtttctagtattactaaagagggggtgcaacacacaggaaaacatttgtgaagtataaaaaaaagtcattcgatcttaaacaaccctgggrttaggggggctgacccctgtgtgtgctgttgaaaatccctttataacttgtatgacttttgactcccccaaaactgaactacgaatagcctactgttgaccagaagccttaccagtagcattaagtcagttcacacatattttgtatattatatactgtatttttacactaaagtaagctataaaaagaaaatgttattaagaaaagaatgaagaagagaaaatatatttattattcagtaagtggaagtagatcctcacaaagctcttcacattgagtaggctaagaggagaggaggcagaggaggggttggccttgctgtatcaggggtggtggcagagatgggagaaaatctgcatataagtagacttgmgtagttcaaacccatgtgttcaagggtcaactgcatatcattaactgctcaattagataaagtcaaacctgaaatgtactgtgtaaccataaaggttaaaactcagtgcaaacaaaggctatgaataatcaggtataatttgcactgggtcctcaagtgtttataggattgggataattgagcagcaaaataaaaaagtattccagacaaggggtttaggttgaacaaagtttcaaaaacagtgataaatctggtaaatatgggagagagttaagagacctgccaatcctaggaatttaacccaaaaagtgatgtagtcatgaatatctctgatctctagttatatgttcacatatcagctaggcagttttggagggggaatttcagaggtgctgataatcaccttggaataaatttattctacaactattggtgaaataaaaagtattgttgtaagtaagaataaatttctctgttaatttattggtgaaattcttccttcttacagaagaaactggtaagattaagtaaacgatagtgcttgtttttggatgtaaaggtgttgtatgaagcccacarttcagtagagaatactaacagggagggaaggagagaggaaaagagaaaaagatgtatcaaagatgcaaaatgttagggttttggagaggatggattttgtatcaccatttgccctttatttctctctcctttctttgtctgctcctacttcctgtagttacatgtgggaaatattaatactacacttgcagggtgaaggtagcaggcatgagactgcgttagaactgctctgtaactaactcagtagaaggcatgttactttttwaaaaaatgatcaaatcatgacctataaagatttacctaacagtttcttggacttttcagatagccgttaatcttcacctttttccttccataattttagcattttcccctcctaattaaaaaaacaaacttgagccagcattaacaatcatcattttgaataggaaaaggaatgtagctcaacttgtgataaaaatgaagaaaagagtctatacaaaggyttgctaagtgtgtttcctgctgactacaaccctctcctgtttactgaaaaggagtcaggaaaactacaggtgttgtccaagctcttagcggttatccacgaacttcgacctactgaaaagtaagatcgatttaacaaacttataagtgctcatagagttttagtttgcactatttctttacttcctacttcccttttaaaataagaaaacattaaaaataagttattttcttctttgggaatatggttagcttctagtatttcataaacttgtaattaacaatgtrtctgtaagttttaagaaaaactaaacatatgtatacttttaaaaacctagtgatattttctgatatataatgcttgtttctcaattttcttcagaatcctttcttcttttactgtttcttaaatactgatacaccttaggattttctctttaactttctcactcttaacacacttcctgagtgctatactccctgtactttcaactattgcacacacacatgcacacacacacacacacaaccataccatgtggtccagtgtgtgtgtgtgatgactatatatattttatatcttcttggataccaaacacatataatattgaaacaaatttatatctctagttcagtcctctcttctaatttctacatctttatttttaagtgttgaatggacatctaaatctatcttgatgtcctatagtacttcaaacttcccaggtccaaaaccatgtgacaaaaccatcattttgttattgtaagcctcatcttgtcccattattccttggtaccataatgcaagcaaaaaccctggaaattattatagactcacttttcttctttatttatcccacagtgtcagtcactaaattctattgattttattttttaatttcaagaatccatcctcatttttctggtaccaagatttttgttttgattcttaaaattactgatttgggttatgatgatctcttataagctacttccctcttactttcagccccctgacatactcaacattgccctgaattatatttctaaaatataaatatgaacttgtcactccttttcttaaaaaatcatttgaagactcccacttgtcttccagaaatttctaaattctttagcacattaggcaggacccttcatgacatggttaatgcctcsttttccagcctcatctctcatcactccttcacacataccatgtggtccagtcataccaaaccacctgcagagcctgtaatttgccccacttctgctctgctcttacatgttgcaggtttctgtggctggcttacctctgcttctcattcttctggccaactttttctctttgttaagcctcagctcaacagaccaagtgcaattgtttatacctataatcccagcactctgggagaccaaggtgggaggattgctcgaggccaggcatyggaggccagcctaggtgatagagtgagaccccttttctacaaaataacaacaacaacaacaagactcagctctcatgctttctcctatctcagattgagttagactcccctcctctgtactccatagcatcctgtacctacctctaatggagctcttctcacatgttttattagataatatttgmtatgtgcaaaagggcatgtgagatgtacatatgcagattgtgacccagtttaagagtgcaaactttcactttagcttctattcatatcttattatctttttttttttaactggacttttttttttctctgaagggtgggcgggataggtggctgtcattggacaaaggataatgagtgaaaagagttttggaagaaatgagaagagatacagtttgaatatagatgtgagaatttatctttgaagatgtcataggggaaagtttccctcttgtggcaagaaggaagaaaggaatgaagaaaaatataatgattaagaaaaataaaagtaatatttggggattgaagttggggtggtcttttctctttatcttgagatagggtctcactctggggcacaggccggagtgcagtggtgtgacctcagcccactgcagccttgacctcccaggcccaagtgatcctcccacttcagcttcccatgtagctgggattacaggaatgtgctatcaagccctgctaatttttgtatttttgtagagacggtgtttcaccatgttgcccaggctggtctcttaactcctgagttcaagcaatctgcgtacctcagtctcccaaagtgttgggattataggtgtgatggtcatttgactccttgtgggtccttaagaaacctaaaccctgccatgttgcattgaaggagaagctacactttcataagtggcacaggctgggtctttgttctkttgcttcacattatctgaagagatcgccttttctttaaaaaaaaattgtggtaatatagacataacatagagttaccattttaaccatttttttatgtataattctgtagtgttaagtacattcacatcctggtgcaaccaatgttcagaactctttgcatcttgcaaacaaaactgaaatactatatctattaaacaccaactccttattttcccctcccttaacacctggactacccttctactctctgactctgactattccagatacctcatataaatggaatcatatagtttttctttctttatkttactgaccaatttcacttaacataatgtcctccaggtttatccatgttgtagcatgtgtcagaatttccttcctttttaaggctaaacaatattccattgtatgtatataccacattttgtttatccattcatctattgmtgaacacttgggttgtctctactttttggctcttgtgaataatgttgctgtgaacatgggtgtgcaaataacttttcaaaaccctgctttgaattctttttttttaatttatagatatatttttattatattctaagttctagggtacatgtgcacaatgtgcaggtttgttacatatgtatacatgtgccatgttggtttgctgcacccattaaattcttttggatataaatccagaagtggaattgttgcatcatatggtaattctatttttaatattttgaagtactgccatactgtttttcatagaggactgcaccattttcatttccaccaacagtgcacagggttcaaattgctctatctccttaccaactttgttactttctatttttttgataatagtcatcctagtggrtgggaggtgggatatcattgtagttttgatttgcatttctctaatgattagtgatatcgagcaccttttaatgtgctttttggctatcttatccttgggaatccccatcttatccttgggaataccttccaagaccaggaatggatgcctgaaaccacagatactaccaagccctatatggattttgttttttcatgtatattcataccagtgataaagttataaattaggcacagtaagagattaacaacaataacyaataatagaacaatcataacagtatactgtagtgaaagttatgtgaatgtgcatyctctctttctttctcaaaataccttactgtgtgtaatatttttgaaccgaggttgaccgcaggtaactgaaacagtggaaagcagatctgcagataatggggtaccactgtggtctctaggtgcctctgtattttctttgtctttcctctgtgagtcctctgtcttcctgctacaatttgaactgatctctaatcttgctacatagctgtcatcttggggcttttttttttttttttttttttgagatggagtcttgctctgttgcccaagctggagtgcagtggcgtgatctcagctcactccaacctctgcttcctgggttcaagcaattctcgtgctttggcctctcgagtagctgaaattacagggggatgctaattttttttatttttagtagagatggagtttcaccatgttgcccaggttggtctcaaactcctgacctcaggtgacccaccccccttggcctcccaaagtgctgggattacaggtgtgagccacagtgcccggcatcctgggacttttaaaaagccatcacctatgcattagtccgttttcacactgctataaagaaatacctgagactgggtaatttataaaggaaagaggtttaattgactcacagttccacatggctgggaaggcctcaggaaacttataatcatggcagaaggcaaaggggaagcaaagaccttcttcacagagtagcaggaaagagagagctagcaagagcagggaaaactgccttataaaaccagcagatctcgtgagaactcactccctatcacgagaacagcatgcaggaaaccgcccccgtgatttagtcacctcccacctggtccctccctgaacaaatgggggttctggagattgtaattcgagatgagatttgggtggagacacagagccaaatcatattaacttataaattcatttttttcctcttctgtgttggattttctgttttctgaatttcacattttgctggagcacatctcacagtagtttcctaagaaagatgggagattaatctttttgacttcttgtacatctgaaactgtctttattctacactagcacttgactgacaacttcccttgtcataaacttctagatcaaaatagtattcccctagaattttgaagacattgctttacatgttgttttctagtttttagttgcttttgagaagtccgatgattttcaaatttcgattcatttgcatatgacctatttttcttcatcaaaaattgatcaacttttattcattcttcatactttgagttataatcttgatataccttaatatgagtcctcattaattgagctgggaactttttagtaggtcctttttatctgaagactccatgtctgggagatatcctttctcgctctctttttttttttttttttgagagggagtcttgctctgtcgcccaggctggagtgcagtggcgcgatctcggctcactgcaagctccgcctcccaggttcacgccattctcctgcttcagcctccggagtagctgggactacaggcgcccaccaccatgcccgactaatttttttgtatttttagtagagacggggtttcaccgtgttagccaggatggtctctatcttctgaccttgtgatccgcccacctcggcctcctgaagtgctgggattacaggcttgagccaccgcgcccggcctttctcttaaaacaatttcttgttttctttggaattcctgtcagtcagatattgaacctcatgaattgattctctaattcttttttttctctcctattggtcatcactttttcttcttaatgtatttcctgtcaaactctcgtactattatcttccagctctcctgttaaaactttgtctatcattttacatttctaagatatttttctaattcttgattgttccttttgaaaaattgcatcctcttccattgaaggatagatagctcttgtttgaggacataaattattttcggaaagttttcttctgttttttttcattgctttgtttaattcaggtttgtttattttgatttttccttttcatgttgaagctcacttcaaatagctggtgttccctggtgtccacagttaagagtgaagcagtaaaacattaattgaacactgtatggataggcagggctcgttgactaataatcatcattgggtaatcaggcagcaagctagcttttaaatttggggactccctatctgtggatcttttctgtggaatcatttaagtctttccatagatgaatcctttagtagtatcttccttgggctggcatatggggtgcctggctgctggtattctagtagttggcaggaaaagggtagagggatcttattcagtatctagactttcattaacacattttttttttaaaagacagggccttgctctattgtccaggctggactgaaactcttggattcaagttatcttcctgtttcagcctcctgagtagcaggggctacaggcataagccactacattggctctcctgccttctacagtcagttccctggtctaagtttctttggtttattttctccagataataaatactttatttgggaaagaaaagtcaactgatcacatgggagcagggcctgggttctacgtaccaatgttgtaatagttccagtctaaattccttccttctcaggtaccttagcaagattctgtggtgcaaatgaactttcatttgtttcttactggaatctccctctttgggcatgtaggcatcaccttatgtatactcctaagcaggtgactgcttcactatggtttttgttttcaaatatcttcagagttagtttctgttcatttttgtattttgctcattctcttgctgtttttagagtgaacctcagagagatgaagaaggcagaaaggtctttgccgcactgtcttaaaactggaagtttagatattgactttaaaatggaatatgcaggaatacctatgttttaattgtacaaggtcattgttgcrtgttctctcartgtcagtgataatattattgtggtattttctttcaactaagaaaatctaatgctgcctttaaatttatctaaagaatctttctttttgattgacagggtggtgttggtatccaactatacacaaaccttgaacattttacaagaastatgtaagcgtcatggatatgcttatacaagacttgatggacaaacaccaatctctcaaaggcagcagattgytgatggctttaacagtcaacactcttctttttttatttttttgttaagttcaaaagctggtggtgtaggacttaacctcattggaggatctcacttaattctctatgacattgattggaatccagccactgacattcaggtaggaatatttatgcrttaaatagatattattgaatgcctgaggatacaatgcctattgaggatacaaagataatgatgatatataatatccactgcataaagagcccttattttgcgtgaggcactctcctaagtgctttccatctgtttaatcctcctaacaagcctacaaggatggatattagtagtcccattttacagatgaagatatagaagcttgttctagatcccacagcttgtaagatgcagagccaggattcagacctaaacctgtatgtctccaggttctagtttactgcagagttggcctttagggtgttcatgaccatcaggtgaagacaataaagttacagatgctatgattagtgtttatgcaggctatagtaagggtataaaagtaacatatttaggaaaatgtttgagaagcctttggttttctttagagtacagcccatctttttgtatcttgagttttctacctgtaggtttgcacctcagttggtatgtgcattgggggatcccaagacaaccctcaggtttaatgattcactagaaggactcaactgagaaaagcagctatactcacagttatgttacattatagtaaagaatactcaaagcggtaaggaaaaggtactgagtccagggcagagtccaagagagaccaggcacaagcttccagttgttctctgccagtggagttttatggacaacacttaattctgtcggcattggtgagtgacagtgcatatagaatattgtccaccagggaagttcatccacgtcttggtgtccagaattttgtttggggtcagttctgtagtcatggaacacctgcatgactgaccttagttaatcagtctttagcctccagaaatcaaactacatgatccaaggccccaccatataacattgttagcataaactatctggtgtggcccaagtgtctggtaaacagacactcatatcaggcaggacattccaaaggcctagagatgatctcttagaagttggttgaaggccagatttttatttgaaatgtgcagggtttgaacatcaacactttaatgcacagtatcattgataaatctttaaaccacagggatccacctagagccttagctgattacatgtatcctaggtagttctcaggggcaaatctttagctatttggactgagaatgaacctccaagcccatgctacacttggttctttccattcttgctgtccatactcactgtcccattgatgaagatctattctctcactcttgcatgatactcttgtagttattttacagtaccatagtaagtgttcactcatccctttctttctgccaagaaaaagctatgaagtagggcatgcttcacacacctgagatttgttttctgaagctgtatgtaaaatatagaattccgaattttaaaacatatttctgcaaattgcatntgtggaaggggccattagtttctactgtactctcagaattctcacttattttctataggcaatgtctagagtatggagagatggtcagaaatatcctgtacatatttacagactcctaactacaggtaacaacccttcagtgtgacaaaaatgtatactctttgaataattaaaattattttttgttagcctgtgcttcagtgtcaggaatatattgttattttattaactagtatgttactaaacattatacccaacaaaaataatgaacataaagatctgaaggaaatctaattaatgttttctctttaggtacaatagaagaaaagatctatcaaaggcagatcagtaagcaaggtctttgtggggcagttgtcgacctcaccaagacatctgaacatattcagttttcagtagaagaacttaaaaatttgttcacattacatgaaagttcagattgtgttactcatgatctgcttgactgtgagtgtacaggagaagaagttcatacaggttagttatattttaattctgttactatgtagtaaagttaatttatttcttgttagcagttgaaaatatttaaagaataactttataatatttaccatttgcatatgttagttttatttttttctcagctcatagggcagctgccagatagagatatttgagaaaatattcagtagaatctttttttttttttttttttttgagacggagtctcgctctgtcgcccaggctggagtgcagtggcgcgatctcggctcactgcaagctccgcctcccgggttcacgccattctcctgcctcagcctcccgagtagctgggactacaggcgcccgctaccacgcccggctaattttttgtatttttagtagagacggggtttcaccgtgttagccaggatggtctcgatctcctgacctcgtgatcygcccgcctcggcctcccaaagtgctgggattacaggcgtgagccaccgcgcccggcccagtagamtyttattctctgaattttagctttttatttytgaatcacttgtgaaaaattgaacttatttaggaaaatctttcaagtcctggtgtaatggctttggagttagagttttttttttttttttttttttttttttttttccaagacagggtctggctctgttgctctgttgcccaggctggagtgcagtggtgcaatcatggctcactgcaacctccgcctcctgggttcaagcagtcttccagcttcagcctcctgagtagctgggactacaggtgtgcaccaccacacctggctaatttttgtattttttgtagagacgagatttcttcatgttgcccacactggtctcgaactcctgggctccagcgatctgcccgcctcagcctctcaaagtgctgggattacaggtgtgagccaccgcatccagccagaaaaatggttttaatccctatttctctttcgcaaaaaaacatacagttgacagaataatcctgttgtttatgttgtacagaatttattcataatggggtcatattttctgaggcacttagaagcataggtcaccatacttctcagtacttgatgtaagtgctagtgctrcttaagtaaagctgaaaatttaccctccagaatagacaccattcaaaaaggaactagatcaggagtaggacttgagcaatcaatgtctagtagctgaaagttacttgatgaattatattaagataggttgaagaagttagactatataagactgagatggaagaatttagattttatataaacataaatatattttatataaatgtttctcttctatggaaatgtttctttatataaatgtttctctttaggtacaatagaagcttattagtttattagttatttgtcatataaattatatatgattatatttattagttatatgtcatatataaatatataactaataactaaatataataaatataatcatgcacaatatataattataacaatatataatatttrtggtagttaaaatatgtatatatttttattttttagtgggtagaatttaaacttcatagaaatgttttcagattttcttcatagccattttggtaattaaaaatattaattaacactttatcctccctattaaattttttcctgttttaataatttctcttcttttctcctttttccttgtatttactctaatgttctttttccartatttaagtttaatacttagcttaatgatttttcagtcttcttttcaaagaagtggatatttaagactatacattttcctctaagctgcccataattttgatatacagtctttcattattcagttctaaatattttgttttttcattatgatttcttctttgtctcatgagttatttaaaagtatgttttaaaatgtattttagtttttgttactgaactctggctaatgctctgtagtcagaaatagaactacatgatatggattctttggtaattatagagacttggggtatggtctagtgtgtggtcattttttgtaaatgtttgttttgtgcatggaaatcgtgtatatcctcttaattgcctagtgtagaattctgtcatattagccagattttgttatgtaatccattttttcttttatagatttcaaaaatgactaatttaacttttgaatcggtaatatatttacatgactcaattatttaaaaatataaaatgtacatggtgaaaactcttcctcctactctacctcctactctacctcytactctacccttatctccctaatttctagccttctacatcaaaagaaaccaccactattagtttttttgtgtatccttccagatatatatgtatgcatatataagccactctagatatatattcttgcccagttttcctcccaataaattatagcatattatatttctgtacctttttcactcagtagygtatcttgagatctttcygtattgttacagagtttcctcattctttttcttcctcagctgtataatcttccagtgtatagatatatcataatttatcccccactatattagtctgttttcacgctgctgataaaggcatacctgagactgggcgatttacaaaaaaaagaagtttaattagactcacagttccacatagctggggaggcctcacattaatggcagaaggcaaggaggagcaaatcagatcttacatggatggtggcaggcaaaaagagagcttgtgcagggcaattcccatttttaaaaccatcagatctcgtgagacccattcattatcacaagaacagcacaggaaagacctgcccccatgattcaatcatctcccaccgggtccttcccacaacacgtgggaaatatgggagctgcaagatgagatttgggtggggacactgccaaaccatatcatccatagatgtacaattaggttatttcccataagtgtgtattttattcatgtatcattttgaatatcttcaagtatacctataaggtaaatttttagtattgctgagtcagagaatgtgtacatttgtaattttgatagatattgccaaaatgccctttgttggatgttgtgtcaatttacacactcccagaaatacactagaatgtctattttcccatagccttgccagtttagtggattatcaaatgtttgtatatttgccaatctgatagtaagaaaataatatattggtatagttttaatttgctattctcttattacgaatgaagttgagcattttcctaagtttaaaaaccatagttctttatgtgaaccatctcttcatattgtttgcccatttaaaacattaacaacctaattttttgttagatatatctattattcaaataaatatattaaaatatgaaactgtgacagtggattagagaaaattgttattttgtcattttctgcttcatatattttatatcttccttgtgaaatatttttttcattatggtttctctattttattgttatgtagtgatcgccttatcccgaatgccttttgctttcattttgtcttaacatattacactagttttcttatcattagggtttgtctggtctatcttttcccatctgtttaccttaaatttctctgtgttcttatgttttaggtatctcttgtcaatagcataaagctgggttttattttttgtccagtctaatattttgtttcagtgagaacatttagtttgtttgcatttatcattattaaggtatttttatttatttctactgtcttttcattttttaacgagggcctaatactggcgaactcttggttagccagaggttttttggttagtactttgcaggtattattctattgtcttctaattttggaagcaatcttgtcatctcttttcttttttttttttgagacggagtcttgctctgtcacccaggctagtgtgcagtggcrctatctcggctcactgccagctccgcctcccgggttaacgccattctcctgcctcagcctcccgagtagctgggactacaggcgcctgccaccacgtctggctaattttttgtgtttttagtagagacggggttacactgtgttagccaggatggtctcgatcacctgacctcgtgatctgcccgccttggcctcccgaagtgctgggattacaggcgtgagccactgcgcccggccttgtcatctcttttcttaaaacctcaatgattatgaacactgacaagaatttgatgatattaaggaatgacttgaggcttttcttttaggtgtgataaaatttcaaagaagtgtttatcttttagaaatgtagaatgaaatatttataagtgaaatgatacatgctatatatttattatatttatttgaaatttcccataattaaaaggttaaaaaaataaaacctccaatagcttcctattgctcttaggatagatactaaaatctctaaattgataagttagtcagggcagtctaattgctgtaacaagaaactaaaaaagcacaatggtctaacacaatagaaatatgtttctcatttgtgtaacaggtcattgtgggcatttagtggacagcctttcataaggtaatttcgtgatccagggttctttcacttggagctcttccatccatttggaccttagagtcctctgctgggatmccctgcatctgccagccagcagtgagagaagagataaagtagaaaattgttcagtttgaaggatgtttatagttcagacctggaagtgacatagctgcattccataggccagactcagtggcaatatctaaccgtaagggaggctggraaaggtgactaagtgccctggaggaaagagaaatggatttggtgaataacggctggcctctgccattcatgttttgcataatccagcccttgaatacttgcttcactgtgcattacttaacttcttttgcattattctttgcttttactctataggctttaattgcataggctcgtatcaattgctcgactatgccagtgtcccttccttttcatagctttttaatgtgcttatcatggaatgctttatcttttttccccatctagttcttttctcatctttcagatcttaatagaacatttcctcagggtgcccttcacttaccttccggaccaagtcagcctctcttgtcatatgtaagatagttccctgtatctttccttcatacccttacctctgtttgtaattcagctccacagtcccttatcttcaattctgaaatctagaaagctcaaaaggtttttttttcttcataaatttgtgacaaaattatttgtggcaaaaccttacctaaattgatgtgagtttatcaatagtctttatttaacccattttgtaagactatttatgacttgctacagaatgttaatgagtttcattatggaatgctgacccagattgttcgaattatattctgaatttgtaaacstggccccacaggttttaggaaagggattttgaatttgtaatacatttttcagatgattatttatttaatgtatatctctcccactagactgtaaggtccttgaagtcagagaccatgcctgtgtttcttcatcattttacctttgctgtttaaatcagtacatagtaaataacttataaatgtttgtaaaaagaatgaatttgttttaacttgaaccatggtgatcaaatgtaataaatcacataaactaattatyataaaacaaaaaagtattgtatttagcaggatattggcttgcctaaggattttctcattgttttacttattacaggtgattcgttggaaaaattcattgtctctagagattgtcagcttggtccacatcaccagaaatctaactccctgaaacctctttctatgtcccagctgaagcaatggaaacatttttctggagatcatttaaatcttacagatccttttcttgaaagaataacagaaaatgtgtcattcatttttcagaatataaccactcaagctactggcacatagtgaaagattacttctgacattccattgctcttcttttgaaaattagtatggtaattaaatgtactttttgaaaattaatagaattatttaaattacagtatatgttgcaaaatatatcacttttgatacaatagtcaaaattgagtggtttaatgttttgtaaatattaagtgtttaaatgaaaaataaagatgtgcttatatcattgtataattgttaataattccttgattaatacactttcattaagtatctactgagaaatttttataaggaatataaaaaggtaaaatactctctgtctttgggaaaactaatctgattagaaatattagacagatgtttgaaacaactgaaaaacttggtaagtttaaaatgtagctcaaaggagaaagagaatgagaggttaggatcgcaaatgctaaagatgttggatgtaatagttgctgcagggcagtttgagtgagaaaagtcaatgggttagtgcaggagttgaaggatttgggaacacttgagagcactagttcctagtttgggacctcagacttatgcagtctataaagccatgtctaccaaatattgtttatgcactgaacaaaggttcagctaccatcatttaagggttatctggagtaatttttggcattgaaaagagtgttttagctgtgcgcagtggctccagtttgtaatcctagttacctagtaggtagaggcaggaggattgcttgaggccaatagtttgagactaacctgagcaacacagtgagaccctgactctaaaaaacaaacttagccagatatggtggcacatgcctgtagttccagctacgtgggaggytgaggtagaaggattgcttgagcctaggagtttgagtttgcagtgaactatgattggatatgatccaatatccatcctgggtgacagagcaagaccccatcttaaaaaaaaaaaaaaggttttaatatacaaagcaacctttagaagactgaagcctgcaaagagaaaggagttactaatttaatttccaaatggggcttctgtaatcagcttttgtttccatttaggaaaatttcttttagacagaaaatacaggcataccctggagatattgcaggtttggctacagaccactgcaataaaatgaatatcacaataaagtaagtaacacatatttttggtttcccagtgcatatgaaagttatgtttatactatactgtagtctattaagtatgcaatagcatcatgtctgaaaaatgatgtattttccttaatttaaaaataatttgctagaaaatgctaatggtcatctgagactttagtgagttgatgcctttttttttttttttgagacggagtcttgctctgtcacccaggctggagtgcagtggcatgatcttggctcactgcaacctctccctcctgggttcaagcaattcttcttgcctcagcctcccgagtagctgggattacaggcatccgccactgtgcccagctaatttttgtatttttagtggagacagggttttgccatgttggttaggctggtcttgaactcctgagttcagctgatccacctgccttggcctcccaaagtgctgggattacaggcatgagccaccatgcccggcctgttatctttttgctggtagagggtcttatactgatgtcaatgactgctgactgatcaggaacctggtgaaggttgctgagggttggggtggctgtgacaatttctgaaaacaagacagcaacgtttgccacatcaattgactcttcctttcacaaaagctttctctgtagcgtgcgatgctatttgatagtatttttcccacagtaaaaactctttcaaaattggagccagtcctcttgaaacctgtcactggtttatcaactaagtttatggaatagtctaaatcatttgtggtaatttcaacaatgttcacagcaccttcaccaggagtagattccatctgaagaaactactttctttgctcccccataagaagtaactcctcatctgctcaagtttggtcatgagattgcagcaattcagtcaaatcttcaggctccacttctaattctagttctcttgctgattccaccacatttacagttacttcctccactgaaatcttgaactcctcaaagtcaattatgaggattggaattaacttcttccaaactcctgttaatgttgttatattgacatcctcccatgaattgcaaatggtggatcttttccagaaggtcttccattgattttgctcagatccatcagaggaatcactgtctatatggtcatagctagctttacacaatgcaatccttatataatatgacttgaaagtcgaaattactgcttaacccatgtactgcaaaatggatgttgtgttaacaggcatgaaaacaacattgatctccttgtacatctccatcagagccattggattactaggtgctttgtcaataaacagtaatattttaaaagaaatctttcattctgagcagtaggttgcaactgtgagcttaaaatattcagtaacccaggctttgttgtttcatttctagagcacaggcaagtagatttagcataattcttaagagccctgggatttttggaaggtggtttcaacttaaagctaccagctgcattagtcccaaacagagccagcctgtcctttaaagctttgatgtcagacattgacttatcttctctagctatgaaagtcctagctggcatcgtctttcaatagcaggctgtttcttctacattgaaaatctgttgtttagtgtagccaccttcatcaatgatcttagctagatcttctggataacttgctgcagcttatccatcagcacttgctgttcaccttacacttatatgatgtggagacagcttctttccttaaatattatgctagcttcaaactcttctgcagcctcctcacctctctcagccttcatggaactgaagagatttagggccttgctctggattaggctttgggaatattgtgcctggtttgaacttctttccaggccattaacactttctccatatcagcaataaagctgcttcacttaccatttgtgtgttcmcttgtaatttcctttaagagctttttctttgcattcagaacttggctaactaatgcaagagtcctagcttccagcctgtcttggctttcaacatgccttcctcactaagcttaattctgtctagcttttgacttaaggtgaaaaatatatgacttttcctttcacttgaacacttagtggccattgcaggattattaattagccgaatttcagtatcgttatgtctcagggaatagggaggcccaaggagagggagagagatggggtaaccaacagttggtggagcagtcagaacacacacaacatttattgattaagattgctatcttacaagggcataagttatggtacatcaaaacagttacaatagtaacatcaaagatcactgattacagataaccctaacatattataataatgtaaaagtttgaaatattgcaagaattactaaaatgtgacacagacatgaagtgagcatgttttggggaaaagtgtcactcatttgcttgatgcagggttgtcagaaaccttcaatttaaaaaaatcacaatatctgggaagcacaacaaaatggggtatacctgtattgtcttgaggtgttaaatactcagttatgtataatcaaggatgaattcttttaatttgttagtgccatacctgggtagctagctgtacatctaggattcatgaacaggcagtttgggaccaaattcgtcagtgaggaagtagccaactagtaataagtaaaaatggtatttcttggccccatgtatatagacttcatgcatgaggctttatatacaacttttttttttttttaagagatagggtctcactatgttgctggactgaactaaactttcaatatctatcttgcatcgtatccttttcaggcataaagtacttaaaaaacattgataaagggcaggtaattctgcctgtctttttaaacaaaaatttatgtatgtatgtatgtatgtatgtatgtatgtatgtatgtatttattttattcacatagttccagccactctgcaactgctgcctgtcttaactgtggtgtatgcaagggtgtgctgcccagattgcccctttcagaaccaaggcgcttgtttctccagctgccagaagcatcacctgtgggccacttatagccaaattcttccccaagaatagccctcagctgagaggatctgcctcacccaagattatgctcctcccctggttggccaacatttgagactggtggatgctgggtagaaaggcccagcacccttatctcaattcaagacaaatctgtcaaaaggaacatttcagctccttaggtaagggtgctgggccctgtttttatagtggatacctattgttcttcataaagttgtttgtttgccaagtagtgtgggaagtaaccttccatccatttctctgcctcactctgaaatcttccagtatcctgcatgagagtgattttgcagtagaaatttcagaagaggctgaatttcatgggagaacccatgtgacatggaataaaggtagcatatgtggcatgggatctcagaggctgagaagtacagaagatagccctctgggaattgatgaagactttggactttgacaagccaggcatttgtggggatttagactcattttatccacatgttaagggaccttaacacctggtttgcacgtataaagcagcttttgcgtgagaggtgctgtttataagaattttccctttctctatgttcccagtccatatgctcatgtggtcgcatgctctccctctctctcttggtggactcctttgaggatggggatttaatcttacttaccctaatattctcaggaccttgtatgggacctggcatagaatagctatttagtaattgaatgaatgaatgaggtactttacctcttttacttctttaaccaccttgatcatgtttcttgctcatagatctcagtttcaaggtatttatttacgccaactgctgagcatggagctgtgctcaacactgaagaaagcagaggcagcagtttcttcttgcctctgacagcatccagacttccctttttgttattgcgatctgtcaatctgctgcatgagttgacagaagctgtcactgcaatgggtaataatttaagtcacatacataattcatttctaattacacaaatacacctttcacacagctttatgtcataatgttctggttctaaacgacaatgcaaatacatttcagtcacgttttcattaggattgaattactaaagctgaatttaaacatgagcagctctgatctgcagaactaaactcctagacagcctatccatccatttaaaagggtgtatgacaaaggagcaagtgaaaaaaatctggctggcatttcatttgagtggctcaattatggcctacagtcacattgcctgagcaactgtgtcctaatattatgtggcaagattaaaattttgactgtgactcacagcaaacaatatgtataattagcttatggctttgtttttctgaattgttcccaaattaatatattgtatcctagagggatttgtagatatgctattttggtattcaaggaaggcttcaacatgacttgatagaaagggatattattttgtcttaccttgtatgataaaaacatgtttttggtttagaccagtttcctgtggcacttttctatagctaacctgtgatctttgcttcaaaccattacaaatttctatccctaagatactgtgttcacaaaatcaataccaattcagaatacagcttttatgatgtaaaaactgtaaaaaaaaaaaaaagtaccttattgacagacaatagtttattggaatttgttacacttacttgaaaacctgaagtgttcagtgtgatttaatctttacaatttttttagatttattaaaaattattttttgtgagtaagaagataataaaattccaaagtagaccaaaattaacaattcctttatttttattttttgaggaaatgtcaacaaaatactgaagactttttttgagtagttaaaaaaaatataacatcatagatgtctacagcataaattctggccgggcatggtggctcacacctgty

SEQ ID NO: 94566 - DNA, 14947 bp, Homo sapiens
gtttggtaaagtcttcatctctctttcatttctgaagaacaacgttgtcagataaagcattcttggttgacagttttcccccctttcagcactttgaatatatcatcccactctgtcctggcctgcaaagtttctgctcaaaaattgtctgatagtcttatggtactttacttgtatgtgatgtgagtcaattttttcttcctgatttcaaaattttctctatctttgtctttttgacaacttaattatactgtgtctcagtgtattccttttctggttcaaactatttggggatttttgcaccttatgaatctagatgtccatttctctccccaaatttggggagttttcagccatttctggactctctgttcttgcctattggtctgtttatctgttttttcaacaacaccacactatctggaatactatagctgtatagtaagtcttgaaattgggtagtgtcagtcctttaactttgttcttctcctgcaatattgagttgactgggtcttttgcctctgcatataaactttagaatcggtttgctgatattcataaaataacttgctgagatttttattgagattgcattaaacctatagatcaagttgaaaagaattgatatatgtttttaatttcaaattcctcttgttcattgctggtatataagaaagcaattgacttttgtatattaactttgtattttgcaagctttctataatcatttataagttccaggagtttttgttgttgactctcagattttttatgtaagaaatcatgttatcttcaaacaaagaaaattttacttgtttaatctcagtctctataatatttatttatttcattttcttctttaattgtgttagcaaggactaccagtacaatgttgaaaagcactgatgaaagaggacatgcttgccttattcccaatcttagtcaccattaagtataatgttagatataggtttctgtagctattttttaccaagctgaggaaattcgcactctattcctagtttgctgagaatttttataatgaatgggggttagatttttatcaaatgctttttctgcacctattaatatgattatgtgattttttttcttttgctttttgatgtgatgaattacattaattggttttcaaatgttaaatcagccttgcatacatgggataaattccaattggtcatattgtatatttctttttttaaattattggattcaatttgctaatattttgttgaggagttttgcatttataaattcatgagaggtattggtcttcagttttcctttcttgtaatgtctatgtgatttttgtcttagggtaatgctggtctcatagaaagagtattccctctgtttctctccttaggaagagattgcagaaaattgatgtaatttccttcttaaatattttgtagaattcaccagtgaacccatctgtcatggtaggttcatgacagatgagtcatttcttttttagaatattattattgatttaacttctttaatagctatagacgatttagattgtctatttcttcatgtttgggttttgaaaacttgtgtcttccaaaaaatgggtctatttcatctaggttatcaatttattgagtatagagttgatcataatatttatttattatcattttaattatcattttaatgtctatggggtctgtactgatgtttcgtctttcatttttgatactaatatttgtgtcttccttctttttttcttagcctggctagaggcttatcagttgtattgatcttttaaaaaaaaccagcttctggccttttgcttctggttttgctggtttttctctgttgatttcctggttttaaatttcactgatttctgcacttattttttactatttctgcttactttggatttaatttttattcttttcctagtttcctaaggtggagatttagattattgaatctttcctttttctaatatatgctttcaatgctataaatttccttctaagcactgctttcacgtcattccccaaattttgataagttgtattttcatttccatttagttcaaaatatctttaaacttctcttgaaatttcttctttgascacgtgttatttagaaacatgttgtttaatctccaagtatttggggatttcccagctacctttttgttgtcaatttctagtttaattccactgtggtctgagggcagacattttttaatttctgtaattttaaatttctaaaggtgtattttcagcagcccagaatttgatctatcttgataaatgttccatgtgaatttaagaaaaatgtgtaaactgttgttgttggatgtagtagtctatagatgtcaattatatacagttgactgatggggctgttgagttaaattatgtccttattgattttctgcctgctggatctgttcatttctgacagagtgttaaagtctgtaagtacaagagtgaattcatctatttttccttgcagttctatcagtttttgtctcacatattttgacaatctgttgtcatatatgttaaagtttttatatctccttggagaactgacctcttcatcattatataatgctcctctttatccctgataactttccttgctctgaagtctgctctgtctgaaattaatatagctacttttactttttaaattagtattagcatggtatatctatcttccttcttttacttttaatctatatatgtctttgtatttaaagtggaattcttgcagacaacgtgtagttgggtctttttttttaatctactcatcaatctctgccattcaattggtttatttagactattgacacttaaagtgattattaatatagttggatgaatatctactacatttttactgttttctatctgttgccatttttctttgtttttatttttgtcttccatagtttttctgccttttgttgttttaatttagtattttatataattccatcttctctcctttcttagcatattagtcacgcttcatcatgcttcttttttttctcttttagtggttgtcttaaagtgtgcaatatacattcacaacaaatccaagcccactttaaaaaaacactacacaacttcaccatagtgcaatttctttttttttctttttgttttttgaaacagggtcttgctctgtcacaatttattgtctgttattctttgtaataacaggatatttccaattcttcccttccctcccttgcctcattgctgtcattcattttacttatatgtaaacatatctatatttatatctataaaattgaatacattgttgatattattttgaacaaattgttgtgttagattaattaagaataagtaaaataagtttttattttactttcacttacacattcccccatgctgttcctttatgttgatttgaatttctgacctatataatttttcttctctctaaagaacttttcttaacatttcttgcaaggcaggtatatttgcagcaaatgtcctcatttttgttttgctgagaaattattgatttttctttcagttttgggaataattttatagggtacaaaattcagggttgatggggtttttttctttaattctttaaatgtttcactccactctcttcttgcttgtatagttttcggggagatggagacaattcttacctttgctcctctctaggtaaggagtttttactctggcttctttcaaaaattttaaaaaatctttgattctctgaaatttgaaatataaaatgcccagattttgtttggcaattatcctgcttggtgttctctgaggttcctggatctatggtttggcatctgacattaatttaaggaaattctcagtcattattgcttccagtatttcttctgttccttttcccttttttctccatctggtatttgcattaaacaaatggtatacctttttttagttgtcctacagtccttggatattctgttctgttttttcagtctcttttctctttgcttttctgttttgggagtttctgttgtcatatatcttcaagctcacagattatttcctcaggaatgtccagtctactgataagcccatgaaaggcatttttcatttctgctacagtattttttatctctagtacatgtttttactcttttttagaatctccatctctctgcttacattatttacctgttcttgcatgttgtctcctttatccattaaagctcttagcatactagtaattatttgttttaattcctggttaaatatcaacatttctgatgtatctaactctggttctgatgcttgtcagtctcttcaaaccatacttgttgcctttttggataccttataatttttctgttaaaaggtagacatgattcgtggggtaaaatgatgtatagggtaaataggcctttaataatatggtagtaaggcaaagtggttttctatattcctgtgattagttctcagtcttttagggaggctgtgcccctgaactatgacctttaccagtgcttctcagttttctgccctctccctgtgagacaggatgggtggaaaaagttggagttgggtatttctccttttccatgtggaaaactggagttgtgcatttctcttccccttggtgggtaaggctctgattaaaccccagcagattcgggtctgataaaatagtttctcctgaggacaggccttgttaagaagaacagaatatggaggtttctgtttgtgggtgtctattctagtaaattgtgattctctgtgttcccctgccggtctttccaattttgaagttttccctgtgtcctcactcctcttacagatacaagaagagttgttggttttttagattcttcagctttttacttcttttgcttattttaacaagagtactaataccaagtgtcagcaagtgtcagtgagagtaaaaaatgatgcaaccactttagacaaacaatctgacagtttcttataaagttgaatatatacttatcatagaacccatcaatttcacttttaggtacttacccaagaaaaatgaaacctatgttctcacaaagaccagtacataaacgttcatagtagctttattcataataaccaaaagttgtgaacagcctaaatgtaacctactgatacaggcaatacaaatcaatctgaaaacatgatgttgtgtgaaagaagtcagacacaaaagagtacatattttgtaattgaatttatatcaaattctacaacagacaaaactaatctattgtggtgtaaagtacatcagtgttttccgagggtctgtaggggaggggattgaatgcaaaggaacatgaagaaactttctgggtgatgtagatgtttttatatcctgattgtggtgatggtagttccacagatgtacagatttgtaaaactcatctaaatgtacgcttaaaatgggtgcattttattcatgtaaattataccttgataaagttgattttttaaaaaaagtaagttctcatggtaactgagaaactatgacaataatctaattctccaaaccactgtgatatactcaagtctaacttaccaatgataaattaaccccttacacttgaaggcatttaagtaactagcttcctttattaatgaactgaaataacttcctataataccatcagtaaaataattacattcatttctctttcagacttactaaataaatgctactactttcaaatacaccaaggaataaaagaatttatatttaaagtgtttggagagtaaacattttacagtatttataacattccctaagtaaataaagcatttaaaaattacttcctttatgttttaaatatgctgtattatgttgaatggcctttaaacacaaaacccagcacatgagaagttccaaggtgtcatctaggtcttcacttctgtgtctgctctgagttgttacagaaaattgcctacacttggggaacgcggcgccccggccgccgcagagccgagccgagccaggcgagcccccgcggcgcccaagcgcgggccccccagccgccgccgggcgcggcatttttattcaagcgagataacggagcccggccgcgcccggtgcattgtgggaacggcccgcggcccgttttcgggaggaggcggagggcgcgaagcgagctggtggatccgtaaagaacccagccaacccccagagggaggggaggggctgagctgtgaggagagcggggcacaagaaccatgtgtacgcgggagtccttttaacccagaaagttacgaattggacaggagcttctggctaaccagattcactgaactgaagggtacaggctgcaaagtgccccaagatgtcctgcaaaaatttctggaatctttacagaagaaccacttccaagaagatgagcagtttctgggagccgttatgccaaggcttggcattggaatggatacttgtgtcattcctttgaggcacggtgggctttccttggttcaaaccatagattacgtttacccgatggtagacgacccttacatgatgggcaggatagcatgtgtcagtcaatgtcctcagtgacctctacgcaacgggggtcatggaatgcgacaatatgctgatgctcctcggagtcagtaataaaatgactgacagggaaagggataaagtgatgcctcagattatccaaggttttaaagacgcagctgaagacgcaggagcgtctgtaacaggcggccaaacagttctaaacccctggattgtcctgggaggagtcgctaccactgtctgccagcccaatgaatttatcatgcagacaatgcagtgccaggagacatgctggtgtagacaaaacccctggggacacaggtggcaatggctgtgcaccagtggctggatattcctaagaaatggaataagattaaactagtggtcacccaagaagatgtagagctggcctaccaggaggcgatgatgaacatggcaaggctcaacgggacagctgccggactcatgcacacgttcaatgcccacgcggccactgacatcaagggctttgggatctggggccacgtgcagaacctggccaagcagcagaggaacgaggtgtcatttgtaattcacaacctcccggtgctggccaagatggctgcagcgagcaaggcgtgcggaaacatgttcggcctcatgcacaggacctgcccagagacctcaggcggccttctgatctgtttaccacatcagcaagcagctcggttctgtgcagagataaagtcccccaaatatggtgaaggccaccaagcatggattattgggattgtagagaagggcaactgcacagccagaatcatagacaaaccctggatcatcgaggtcgcaccacaagtggccacccaaaatatgaatcccacacctgggccacctcttttttttttttttttttttttttttttgtgagacggagtctcgctctgtcgctcaggctggagtgcagtggcgccatctcggcccactgcaagctccgcctcccaggttcacgccattctcctgcctcagcctcccgagtagctgggactacaggcgtgcaccaccacgcccggctaatatttttttgtatttttagtagagacgggttttcaccgtgttagccaggatggtctcgatctcctgaccttgtgatccgcccgcctaggcctcccaaagtgctgggattacatgcttgacggggccacctcttaatctagacagaaatagctgtttggttttgtttttaaatagacctatttcctttatcatcacttcaattaaagactataaacaacagaaatctcattgtgtctacacatcgggtgaccttaggtcggtttgtaagtggatacaattaataaaataaaatccgtcacctttttttcctgttacattaactgaagatgcacccaatcttgaggcagcttctgagttgagaattatattgttatccaatactgttgattcattttgaatctttagacacttatctcttgctgcataggctctttttaaaggtgctttcacatagcacagacattaccagtagtcttgtcaaatagcagttggtgtcttcattttatgtatatttatcataagtctgattttttttaagcgtcttgaatggttttctggagagacagcattgataagtggcacatgacggtatctcagtcataagagggttgcatgattcctttgaatgtttgatttggaaaagcctagtcttgtctctcaagagcatctcagacccagaacattctctagtagtgcactcagttaaacagggcaagtgcttcactgcatggaaaacactttgaagagacaaaaaagaaatcttatttcttttttgtagcctttctgatatttacaatartaccactaactgttttctttatcgatagcaaagaacgatactttttgcaatgtaattagaygttctatagtgctacaaggaaatgccttccaaaaggaggctcatgtataatactcatttacaaaatatataattacgcaaataaattttaaatataatcaataataaagactgttctgtggatgttagtgtttaatacattttctattttgtacagtgatttcaggccttttgttttcttgaaatcagcagatatttagcctaattcttagcattattttgtcctttgcaccagtacttttttgtgcacrctttttgtgatctgtgttaaaaacctgcatggccaacattgcagctccaacttaaacttgttattcaaataaatatttaattttttaaattgctcttgtataatcagattccccttttagtattattttagaagcattgggagggttttgcctaaagtacaatttattgggaaaaactagattttagttttataaaacttttaagtctttcatgggacctatatttaggtgttatctgtgttgcataaagtggaggcttccttatattttaacctactaagcaattgagggattcctgtcattaagcacaagcactggatcctcaagtgcccatcttcatcagagaaaaaatagcacatcctgcacgtttctggtgcttcctgctcacaggcaccaaagccgcacacataaactgacttactgccaaaggaaatgaccccctgcgaagatggagctcctggaagaggctttaacttggatgcgccctcgtccaggaaccagcgggaagggcagcctttatgcgtgtgtaactagaccttcagccataagcatggtgcgcagcatggaagagcctgctatggaactgaaattgattgaacattttataggaattgatacagatgttggtcctaaaaagctacaaaccagtggtctgcaaaataaaatgtgttggaaacctctgagtaagaaaaaagaaaaagaaaattgcctacatttgttatttcagagttcatgaaactgtacaaattctattcacaattttgtgggggtaaaacatatgagcccaataagaatgatttttatttaaatcataaagaattcattgaaaattattaacaataacttatataatattttgatgctatagaagaaaaaggacaacccaacaattaacacatactcttgggttttaaagattagcctcaaaagataagatattgttaccatcttatgcaaacaaatcctatcatttccttggacatatcctgagtagaatacaaacccttatggtaccatctaatagggtttaagattttaacaccaaaataaattcttcatttattaaaattttataacaaaacaacattcttttcaaaaggattcaatcataaaaaggaaaggagacaggctgggaaacatggcgaaaacccatctctacaaaaaatacaaaaattagctgggtgtagtggcacacacctgtattctcagcgacttgggagggaggtgggaggatcacctgagcccaggaggtcaagactgcagtgagtcgtgattgtgcaactacattccagcctgggtgacagagagaaaccctttctcaaaaaaaaaaaaaaaaaaaaaaaaaaaaggagaaccgaaagaggagaaaaatcttacagagaatgtcagtttcaggattatgttctagtgacctgaatctatacattcatcgacagagacgtgactcccacagtttgttttgcagatagctgtaaagtaattacacaaattgcaccaagttctttccagatgaactgaacacttagaactagagagtgttgccaatttgatcagaaattagatgtgattctgagattgagaaaattgcagaaatatgatttttgagattttgagaaaataattcttctcttcttcaagctgtacaatgggatctatagacaaagcaaactcttctatctatacagaagaatgttatctctgagacttttgaatatctatttttgaattatacataatcaggaaactcagggcttatcttccttcaaaactcctccactaaaatagaatgatttactggaaagttacttgccatattctgcatcttcaaagacgagatctcctttatttctctaccacaaagtgttctttagaatttttcattgtatcgatataaattgatgccagtcattactacacgaaagatgaaactgcaacctctacacaagtccaagtaacaggattcacacagggagagacggatacactgacgtgctcttcagtgactgatggactgtgttttctgtttaaaaaaaaaaaagtactataattgaacaagcccccagagcattaaaaaaaaagtgtaaaaataaatataaggagagtaactaacaaatttaaaaatatataatcaataaagatcggtgatattgtagcatttcaagataaaactacatcttcaactatttttaaaatgttttccatttggcagaaccccaaatgggctttgccaagcactttttcttcttaatttttaaatgcgtatgtatttcaaggaaaatttaatccatatgttcttctctcatttacacaatttatcaaaatgttgctttgaatgagccatttaatgtctaagaaaactgaagaacacttctttttcccccaatacaagattttagcttttttcttcctgaattaaatatgtgttcagtactacctacagagctaattgaaaaatattcaattctgctttaatatccagaaccaaaagtctaataaaatttgaaataacagaaaagcataaaatccattataatactatacttttaagcttcaaaagcctccattattcacacggttcctataaatcacagaatactggaacttaaagatatcttagaaatgacaagtttttttctctcactttaaaaactaggaaactgagtccccaaaaagccaaagaatatgccaaaaatcacaaaactaattaatggcggagccaaggcatgtgtcttcccattggaattacttctttggtttttttaaattttaattatgattttattctataacatataacagtgtcagcataatactagattatgaaaaaacagtggagctcatttctgcataaaatttactcgcctgctgccaatagcctggacaaccagtaggctaggaatcaatggcccaattcgccatataatcctagtcatatctatctttactatgcccataaagggaagtgatgaatctgtttaaaagaaaaattaagtccaagtacactctcaacatttaccagcaagatgctacaggaaaacacgctgattatgttaactgataagaatatttcttcttcccttccttatcctctccttccttctacttctctttccagaggggatcattttgggatacacagaaacctggggatgggcataccatggagtctggaggggctcagtagtgacatgagcccatgggatgggatcaagatacacctttgcttcagcctccgtcaccagtgtctttagacaccccagtttcttcaggtaggcaaaaaggcacacaggaataaaagactgctatccccagggaaatgaaagtagagaacaagccaggcatggtggctcatgcttgtaataccagcattttgacaggccgaggcaggcagattacctgaggtcaggagttcaagaccagcctggccaatgtggtgaaaccccgtctctactaaaaatacaaaaaaattagctggggtggtggtgcacacttgtaatcccaactattcaggaggctgaggtaggagaatcacttgaaccagggaggcagaagttgcaatgagccgagatcgtgccatttgcatatcagcctgggcaacaagagcaaaacttcgtcttaaaaaaaaaaaaaaaaaagaataaagaaagaaagaaagaaagaagagaacagagaggattatggcttctttttgtcaggtcaggaggcagtcataaactacagaccacaaatcacaatcaaaagaactttgtaaggtcctgttacctcataactaactaatgtttagattgtgttactctgttttgtagcagtaattaccagcaaaaccctatttttttctaatgtgatgggaaagggcatatagtatgtgcctgccttttaggagtaacaaaggagaaatctgggagaaaccaaaatgacatagtgcagagcagctcagtcacttccttgtgatttaacctgctaaagttacttaacctgtatctcagtttcctcacctataaatatggaataatataggacctacttcacaaggattagcaaaataatgcatgtaaagcactaaagacagtgtttgcatataacaagtgttcaataaaaataattgtggttgctccatcatctttttaaactaaaataggaaaacaagctgaatttctaggacttgtggcaaataaagaaaaaacgcacacacaggaagataatttaggactgataaggaaggacccctgagtctaagcaatcaaagagctattacagatttgctgaattctagacccaactgtatactctaaacaaaaaacaaggactcaattaatggtactatagcacatgcccatgttacgcatacatgtggcatttgaaaaatggtcacactgcctttttctctcttgacatccaactgtcaaaaagaacttcatatattcaatgattggacagccattagaatccaatgcaaaacactcacaactctcctcagaactcttggttttagaaatggtagctttggcaataaccttaatgatgtgataccttggtccagggtggtggctcacacctgtcatcccagcactttgggaggccgaggtgggcagatcacaaggtcaggagttcgagaccagcctgaccaacatggtgaagccccgtctctactaaaaatacaaaaattagccaggcatggtggtgcatgcctgtaatcccagctactcaggaggctgaggcagaatttcttgaccccaggaggcgaggttgcagtgagtggagattgcgccactgcactccaggctgggcaacagagcaagagtccatctcaaaaaaaaaaaaaaaagtgatacctttggggatctagtgaagtggagttgcttttccttggtggagtttttctcttttgtctatactatgattcgtcagaccaggtgtaaatacattggaaagcacactggcttgaggagtggggactgtgattgcaacctaagtgccactctgaagatgacattctattcctaggaggcttttttctatgtaaaaatgaggttaaatttggtgatcataaatgcccctaccactctaacattttatggacttataatgatacagttataaaatagtgagttggttttcctgtccattattactctaacttcagaactggtttttatatagcacctttctttgaaaggtctaggcattgtgtacagacgaccaagaaaatggagaggaatgttgagataaaatataccttagagttggatctggggctggacatggtagctcatccctgtaatcccaggactttgggaggccaagatgggaggctcgcgagacagcaagaattggagactagccagggcaacatagtgagacctcgtctctacaaaaaamaaacaaacaaacaaacaaaaaacaacaatacattagctgggtgtggtggcatgcacgtagtgggaggactgcttgagcctgggaggtcgaggcttcagtaagctgagattgcaccactgcactccagccttggcaacagagtgagaccctgtctcaagaaaacaaaacaaaataaaaataaataaataaatcaaagaaaatagaattggatctgggttcagatgtgggttcttccactttattagtggcttggtattgagccaattaatgtgtctgagtctaaatttgttctgtcatgaaatatgattatttaacttcttcacagggttgctcaaggattaaatgaggcataagcctcatagtaagtgctctatagaagggagctatgagagtggcaagagaagaaacaatgaactcaagcatctgaaaaggtcttgcatcacaagagaaagacaatatgcacaaaaaatagtagtcaccgaacccaaaatattatttttattttacatcatgtgctaaaatactattagtagagatgcagaggaagcagtgtgatggtgcttgctgacagcattaatgaagaactccccttagaactcttgggctttgctgaatgctttcacagttgttgttttaaattacaccacacgcttgaccacattgtattcacagtgccagacattttggacctactggaaacaaatatatattatattgatgactaagtgaaacatctcatatttaagtgataaaaatattatttttaactttaaagtttaaaaattgatgagtctgaaataccttaaaaatagtttttcataaataggagggagtacatgagaatatgcccaay

SEQ ID NO: 94567 - DNA, 13320 bp, Homo sapiens
ttcctagtggttcttttctgatggaacctctgactggtaacatggcattaccagtcctttccctctcatgttttgctatttcctgatggaacctgggagtctgagtgatttgtatttcaagaagcagttatgctggatctctttgttggttaataccccatgacctatctggccgttatgggatatttcagggataggagttgtgaaagagcccttggctggacgtttctagccttaatctttggcaagccatttcatttccctgagcctcagtttccgccttcctacagcgtgagcaggtctgggtgggctctcaagcccctttcagctctaagattccaagtctgtgattccgatacatcttgactacaatgagcgtgtttaccttttgtctctgagcagtggccctgggtcttggtagtgactaaattccgagctcccaaggtgcagctgcttttcttccttttaattataaattagctgttcattggctgcttctttctagagcctgttttgcttatcttgcaatctgttcatttctgttgatgaacacagtcaaataggcctctatgtgcagtctcctggtttccctggtcaaagtggaaggttggtagaaactggccttcatgtctttgtttccctcaaagttttattcttagtaacgctatatatggttttatagaccacacatatatagtttcctgtgtcttagatgataacatccttaaaatatgaaatatattttgaacctagatacctacccagtattctctgcacagagtaaacatttcattaaatgagtttcaaggactccataccctgatataggagtacattcaagaaatgagtttaggccgggcgcggtggctcacacctgtaatcccagcactttgggaggccgagacgagtggatcacctgaggtcaggagttccagaccagcctgaccaacatggtgaaaccccatctctactaaaaaaaatacagaaattacccgggcatggtggctggtgcctgtaatccccgctacttgggaggccaaggtgggagaatcgcttgaacctgggaggcggaggttgcagtgagccaagttcgtgccattgcactctggcctgggtaacaagagtgaaactccgtttagaaatgagtttagtctgggagaatctgctttttgagtaaaaaagtttgattttatgtatgtgtgcgtctgtatatatgtttctgtatcctgagtatttctttgcggcttcttcagttatgaaagaggttggtactgttacccttacgttataggtattacaaactcggttttacaaggttacataaactaatggccctggggcgaatgacgtatgccacttttgtgttgatttgtagaacttacttagctttggcatttcccctagtaattcccaaggcaaaaccaggaattgtcagagacgtgaccagacatgtattaaaattctagtgcaattgggaaacttggtcttcctgatttgtttatacttcagccaaacccagatatatagtgctcagcagaaattattcaaaatgttgatactcaagattgaaggatggattagggagaaatgaaaacttttcttcttgtggactttttaggtatgaaatttaatcacgagagtagttttgcttttctttccctgacctttcgcttcattcctttgttaagaactatatagtgcctctgaggaggtggcattattgttcactaacttaccataaatcaggggtctccaaaccccaggccacagactggtacccatctgtggcgtgtgaggaagtgtgctgcacagcaggaggtgagcggcggatgagcaggtgaagcttcacgtgttgttgttgttgtttattgagatggagtctcgctctgttgcccaggctggagtgcagtggcacgatctcggctcactgcaacctccgcctcccgggttcaagcagttatactgtctcagcctcccgagtagctgggactacaggtgcccgccaccacacccggctaattttttatttttagtagagatggggtttcaccatgttggccaggcaggtctcaaactcctgacctcgtgatctgcccgactcggcctcccaaagtactgggattacaggcgtgagccactgcacctggccagcttcgtgtgtatttatagctgctccccatcactcacatcactgcctgagctccacctcctgtcagaacagacccagcattagactcccctaagagcgtgaaccctattgtgaactgcgcacgtgaaggatctaggttttgcgctccttatgagaatctaatgcctgatgatctgagatggaacggtttcatccagaaaccatccccctgcttccctgtctgtagaaaaattgtcttctatgaaatgggtccctggtgccagaaaggttggggactgctgtcataaataacattgaatttcatgtgggttttttttttttttgacacaccaggcatgtctcttccattcaaatgctatggctacagagggaaagggtagccagataattatccacatgcttcaaaccaaaaagataaaaaagttggcaactagatctagttgcctgccaggatgaccagcgttatgctggtgtgtgcgtgtccatgcctccgggatttttccagggttatcaatgtcagtgtaagatctgatggaatttaccgttgactcaattttcttcaccaatcaaggctcattccttgaggcatgagttatgcgaaaagcttttctgcaccaagtactttcattctggtctttggaattgtcataattctgacagagaacacagaccattactgaatgctcttcaggttaccctatttgcctgtcacattgcttctaccggccacatcctgcatttcctgtgggacagcattttcaaacggattctagtgtttgagctggaaccaaaagaatgaaactgtttttacataagtgcatattgctgtctctgcaaataaagtacaacaatatgactgacttgtaaatatcttccaggacaatgctgtgattttccagttgattctgcaactttaaagatataaccaagtataattaggccgttcaaggatgaatgggtcccacagaagctagaaatagtttacttcccgcttccatttctagatgcagaagactaatattcacagaaaaattacgtagacaaattttgtttactagatctaaaacattcctgcttctcagaaaaacaaaaccaaaggagtatttaagataaagtaacagtgaacgtgttgagactaaaaagtttccatcaactagtcccatatgcaccctctacccttcacataatctctttggacactcggctccaattttgtcttatttttcttcacatctcaatctacaccttcctaatatgtccggaattggtggattcttggtctcactgacttcaagaatgaagtcgcggaccctcacagtgagtgttacagttcttaaaggcagcgtgtccggagtttgttccttctgatgttcggatgtgtttggagtttcttccttctggtgggttcgtggtgtcgctggctcaggagtgaagctgcagaccttcgcggtgagtgttacagctcttaaggcagcgcgtccagagttgttcattcctcccagtgggctcgtggtctcgctggcttcaggagtaaagctgcagacctttgcggtgagtgttacagctcataaaagcagtgtggacccaaagagtgagcagtagcaagatttattgcaaagagcaaaagaacaaagcttccacagtgtggaaggggacccgagcgggttgccaccgctggcttgggcagcctgcttttattctcttatctggccccacccacatcctgctgattggtagagccgagtggtctgttttgacagggcactgatttgtgtgtttacaatccctgagctagacacaaatgttctccaaggccccaccagagtagctagatacagagggttgattggtgcattcacgaaccttgagctagacacagggtgctgattggtgtgtttacaaaccttgagctagatacagagtgccgattggtgtatttacaatccctgagctagacataaaggttctccaagtccccaccagactcaggagcccagctggcttcacccagtggatcctgcaccagagctgcaggtggagctacctgccagtcccacgccctgtgcccacactcctcagcccttggctggttgatgggactgggcgctgtggagcagggggcggcgctcggggaggctcaggccgcacaggagcccacggagttcggggaggctcaggcatggcgggctgcaggtcctgagccctgccctgtgggaaggcagctaaggccctgtgagaaattgagcacagcagctgctggcccgggtgctaaaagcccctcactgctccggcggtggggccagctggctgctccgagcgcagggtccgctgagcccacgcccacccggaactcgcactggcctgcaagcactgtgcgcagccccggttcccgcccatgcctctccctccacacctctccacacctccccgcaagctgagggagccggctccgccttggccagccgagaaaggggctcccacagtgcagcggcgggctgaagggctcctcaagtgccgccaaagtggaagcccaggcagaggaggtgctgagagtgagtgaggggtgtgagggctgccagtgcgctgtcacctctcactaatttccccttagtttattttttgtttaaaatggagtttcgctcttgttgcccaggctggagtgcaatggcgaaatcttggctcactgtaacctccacctcctaggttcaagcaattctcgtgcctcagcctcccaagtagctgggattacaggcacccacacctggctaatttttgtatttttagtagagaagggatttcaccaggtaggcccggttggtctcaaactcctgacctcaggtaatccacctgccttggcctcccaaagtgctgggattacaagcgtgagccaccgcccccagcctcccctcttagtttaattcctggtctaattgtagttgtcacatccaaaccagtcctccaacaatagcctgctgaggctggtcatgaaggggctccgagctctgtcagcaactggcctgaacttcaggctctcccaagatctgcatcttctcattggaagcctctcactgaaacaactgttcctcctgttaccctctatctctggaggctgatttattctaattccctttattcctctatctcacttccacctctttttctgcagggtcctggccaagatagctcttctagtctagctcacccggcccaatctttcttataaattttcttaaatgtaacttcaactcaaccaacttcaaggtcacctgtgattctttctgtagtcaatattccatctgtttgcactgaagctttattccttcaatgcctaatttttatgaaactgatgagactaagtttctagtctcataagtcatcaaatctagtgtcatgagcagagaggttgttgagatgtatgtggcaaggacaaaggacagctcttcaacaattgcccttcctgtttttcctgtaggaatcgtaacatcatttacatgttatatcgaaatgggccatgagtgtgtagctggccttttttttcctaccatgtacttgtgtgttctggaatcagtcagctagaaaatatttaccaagtgtcttaggctttttcactgtagtgtgcatttaacgtacacagtaaagaatgaaggctggcactaaactgttagctaatcatccggtgttccatgtgaatgacagaacacggaataaacctgatgacaccaccactttattttgagctaaatcctcatttaagtgagaacaggacaggtttcaccactgcctcctttggcaacttgagtggtggtgttcccaccgagtttatggctgcaaagataggtcttttctcgtatttatgtataaacaggtaccagttttgattttatttaatcatttcatacattaacatacatgacacatcaaaatgagaaatgcacagtttaaccgttcaacagctggccttacttcaaaagaacactatattcatattaaacatttacagtctttccatctaactttacacatgtcctaaatcattttccagcacttctcacatagaagtctagttttgctctttaaaatcaccatctgtatcacccctagtagamrcgagggtttccccaattacatgctgaagagagccagccaccaccccacctaaagacatccaagcagctccagagcctgcctccgaggccaccccttcgccacggcagtctcgattccaagaactgattatctgacactagtgaaccagcactaaaggctgtaggatgtgactacatcacagttccagaaggaaggggaccatggccaagagaagccctaaatgacagaagctcattaaaaccaagtsccccaaacctcctgaaacatcgttagcaaggagctactgctttcctttcttaaacatgttttgggcatgaccacactctggaagtggtgaactgttacacatttggtgtgtgtgtacataacatcaaaaactactgtgtgaaacttgagaatgtctgattaaagatttcaatgtatatctaaaaactaactcaaatcgttgaccrgcactttcccagtatcataacaatgcggctgaccctcttctgccttcactttacaccccatcatagcacattatttgtgcacaactagtgaggtctgtgcggctcatcatccccataaccaagtcggtctgtgttgagtcatatcattctgtgctggttttagaagtcaccataggaaacatgaagtcacatcctggtcaaaaaactgtccatttctcaaaaacagagaaaaacctgagatacgaggcagcaactagcgacacttacaggaagggaaagaacaatgacaacacccgcccagccccacccccaaaaagctgctgttgtgaattaaggcttcaaaagaggacccacaytgtagctgataaaactcaagccaggaggatgtttgaaagccaatctgcactatcacttgttccagtgacctcctatgttcagctgccaggaccgattccatacagtgattgtaggttgaggactgaggacgcccctttgctctcgctccattttgatttgctttttccactgaagacacgccggccagcgtttccaaaaacagcttggccatggctttgcactctattcacaactgatcaaaactcaatggtcttctcagctttctcaaccgttttattctgaatattccttcctcactaaagcctctctcagccctactagtaaatgtgaaagtctgaggcaatcatagaaacatcagccccatcgcatgccgaggggataaaagccactaaggaaacaggtttcctgcttctcctcagcaatttgtacctttcttaatcttcccataatttacctccctaggaagtttcctataaaattctgccatattattacattttaccaactgtatccatgcagtgaagcagaaagggcaaaaacatctgctttggctgagaatttgaaggtgctgctgctctgctaccaacccaaataaattcacatttggcttgaaaccaagttcatctttatttaaaggattgacaatcccattttaaacaattctttgatttacaaagagggaggtagactcgttagcctcccaaccttagcttaaatcgtgatgttgccaggttcctggtggttcagctgaatcctagacagtttcccttctcttcataaagctgagaagaaaaaaaaattatctccatctaggcccacgggaattttgtgcatagacagtttgaattggtctgaaaagtgtgactagctacctacctattcacaatgcctagaaaatgggctaccagatatggtagtggtcaaagccccgactttcctgtctgaggtactgggtttgctctaaggtagaccttggcaaggcccctaatggtccgtccagcagagtgatgctcgtgtccctcggctgtcaggtgagcgtgggtttgtgaatcagctttggataggatcatttctcttggatttaccactaggctctgtccctaacagggtctacctacctgacccccaagctggctcagtctcagcgctaaggtgtactatggaagggtccggacaaagactaatatttgagatctcttagtagcacaacgtgaaaatggtaggggattttgtcctccaacaccaaagacacttgcttttttaagaacaagaggatgtgtaattcactgaataaaatggttttcctccgtctaggggggattctagcatctgcccttccatttttgttgagagaagtattagctgatctctcaaatgcagatgttaagagagtaacaactgggttgatccacctgttgcttttacaccatagctccattttccaaaaatatatatgtatgtacatatatatatttcagatttacagggaatttttttgtgaacaagaaaaaaaaattgtctatagaagtcacaagtgtctttcttctcaggagacctcaatgatttccatgctgcccgaaaagctagactgactgcccactttccccagctcttcccgtgacctgttctctgacatgatgctctctccaaattccatttggcagcttctgcgtttaaactgcttttcaaaggggctctcttcatgccagctccgccgcgagtcagctctgtcacttggcttctgccgcctgcgcacagaatagacttggtctccgcaagtgggcagctggctgcagctgtaggcagagtaactggcactgcctccgtagatggctgaggcagagtagaagtgtgaggactctgtggcaaaataccagctgctggtcagggaaggggtagaggtctggggggccaagatatccgagtgccagcccttaaggcccaggccagcagacttcgtgaggtgctgctggctggtggaaaggccgaaaaggaagctggtgtggtaattgtcctccacgctcccacttcgatgcagtggagataaaagggacctctgggcggtgccactgctgctggttctgaccgaatgcaatcgcttgctctggctgtctgaaggcctggcggtctgcagcttcttggggatgctggcttcctccttatcaggactggtttcgggagtctgctccgatagttcctgaacaggggagaactggcatagcttgttggtcccatccagagtagtggaaggtttgtagtattccaaagcatcttctgatgaggagaagccatgtaaggatgctgccatgctggctgaatatgaaactgatttgatatccagagagaaggaacgcttgagcttattgctgtcttccagcctgtctgcggacaggtgcagcccactgagcgcctgtaccagcgggctgtcctctaacagcgacggctgcacgctgggcacgctgggcacgctggcgggatgcacgggcctttgtcctgctgcctctgaggtagcagagtcggcacagggtggactgaggggcgtctcgcttttctgtccaccctctgagacagcagggacaggttcatttggcttctccaggtgcagcagcttgagtttgctctttggccctgatgctccagtctggttcttaatcttcttctcatagtccaggagttggcccagaaaattgaagtttggagatatagtaggtcttttttctttcacaaatctgcagagagaggaaaaaacaaaaacccgaattttacaactacactttatcttaagaatattaagtgaataaatgagatagggaattatcaggcagacctcaaaaactttggaagatgattggtttacaagttcggggagatgcttcaaggtggagaatacaaaggccctaggcactggggaagctttgcacacatcctggagtatgccagaagaggcagctgggccccaaaggctctagtttttgtctccttattttcaaaggcccagggctcccaatgcagctgataagagatggtatggggttttgttggtggtggtcttttttttttttaagagacagagacttgttctgtcgcccaggctggaatacagtggcatgatcatagctcactgcagcctcgaattcctgggcacgtgcagtcctcccacctcagcctcctgagtagctgggattacaggactacacgcttggctaattttaatttttaaagtttcttttgtagagaaagggtctcactgtgttgcccaggctggtcttgaacttctgggctcaagtgattctcccaccttggcctcccaaagtgctgggactacaggtgtgagccaccatgcctggccaagagatgattatttattcaccaccaaggacacccctgacacacacacaccagtgctaccatcaaaagtacagtataacagccactctccttcttcaatttccaatgtcatcccctcttaaagtcaccagtcacttctcaagacagttcacattttaaatttaatgacaaaaagaagatggtatcagatgatcaaagtatcaaagcaacacttctttttatagtcaacatgacagactaaccaagacaaagtggtctctgtgtgctaagcactgtgcttatgcactgaatcatcatttcatcctcagaactaccctttatcaggtgggtgtcattatccccatcatatagctccacagaatccttaagtgacttgcccaaaatcacacagctactaaatgatggtgctggattcaaaaccaggctggtcaaatatctgggtccatttttgtaaccactatgttaaaaaaaagattcatcaaaggatcaaaactaatactagatggctttcatgtttcatggaggaaataaagactcagagatgacagaccaattcttcagcggcccctgcacctcatggatacttttcaggtgatggaggagtagaactacactgaaaatttgcatttgaataaggaacaaggaaaaaaaaaaacttggaaatcaagtaacctaaagcaaattcacaaaaatagaaataactggctcaagaataacaagtataaatgtagggtgctcataatgagacttcataacgtgatagaagggtgccttttcttctgatttctacatggagcaggaggacctcagggaggtctgaacggcggcatgagagctcgtgcagatgaccagaggacccacgtcctccaggctgctgacttaacatgggaagctgtttgggcagctcatttctgttttccaaactttgcaatttgagaaaaaaaaaatccaactgttaaatcaggcctgctccatgagtctctatatttttgattccttatcagataaaaatgaaccatctctacccaacgatacatgcaggggagtcagacaaatcagagactggaggcaacccagtcaaaatcacacacacacaatctggccgactctagaatgtaggaaattttactgaagaatggagtctgacagttaatctggttcatatttgcatttatgaggctttttcttcccagcaatccaaagtttgaagcagaacagagattctgcagtgagcattctattagagcttccccccatcatatgcaaattaaaacaaaggatacttttgcatttagggaaagcaataaactcatgtaacaggatagagatctctgcctggatctgttgttccttaaacataaaaagtggctgaggatgagtctgacacatgtgaaggcagaattaatgctaaatagtaaaacagcattcttttccaatcttcacaagaccattaaaaaatccacagtaacctgtaaaaaatgtgactaaaataatcatgatctgctttaatttggttacccatcctcatcattctttatgtttcaggtcaaatgaaaagccaatcacagaagacattttcctgccctcacctgtaagcttcatctaaagacatgtccatcctcttcatgatgtaggcgatagcgatggtggcggagcgggagatcccagctaaacagtgcactagaacacatccattggaggcttttgctttctctgtataagtcaaatgcaagaaaggtcactactaactattttgttcagcagtgaaatcttgtttccatttacttactcagtgtcttccacctgaaaacctctacgcaaatctcatctgtgtatatcatatttatcctcgcaatattcttttgaggaggcaggggaagataattccctcaccactgacatgcaggacaactggggtccaaaactgtttgttaataagcaattcgttaataagcaagctactactaactcaggtttcctgacttatgttagtattttcccctaagatatgggtaatatttaatatattcctgttatctgacacttcaaatttttccctgattacctaagaaatataattacattttttaaaatcattattactattttgagatagagtcttgctctgtcgcccaggctggagtgcacgatgtcggctcattgcaatctccgcctcccggattcaagtgattctcctgccttagcctccagagtagctgggattacaggtgtgcagcaccacgcctggctaatttttctatttttagtggagttgcggtttcaccatgttgggcaggctggtctctaactcctggcctcaagtgatccgtccacctcagcctcccaaagtgctgggattacaggagtgagccactgcccctggcctccctattttaagcaacttttctgtatgtcataaaatggctcaactttatttactgagttttagaagaaaaccttgtataggctatgaatcaggtttagcaggtcactttaatgagatccaagagaacttttatcccttccttgataccaggagttattgtcttatggcattatctcaattccccacaacatgatggaaggactcacggacactttgttagaaccaaagaaccaaggaaatccaagcagtgctgccatctctcactgctgaggggcttaacaatatgtacatgtggcaggggacgaggttattccacacagcctggaagctactaacattctggccagttccatgactgcctcaattctaaataattacatgtgtgctcagtcatgaagctgaattctccccttttcattcttggtagatactaccaaaagtctactgaaccttgtgttaaaattcttgcgattaacagatgcgcaaagaatcttactttggcagctgaataatacaaagct

SEQ ID NO: 94568 - DNA, 128324 bp, Homo sapiens
  misc_feature (1)...(128324): n = A,T,C or G
tgaagttttcctagaataatggtttgcagtactttttaaagcatcagaaccccctttcgatattaaatattgcttagaagaacaatatacaaacagctgtgatcaagcaacaagtgtaaacatgcattggtatttacaatgtcccaggtgctgtgctatgcacttgtatgtgtgttttttcattaaatcttcacaattctatgatgtggtatctataaaataggaattacttctatccttttttaagagatgaggaagcaggacatcaaaagttacaggtaatgtgtggcaaatctagattttgactctggaagtttgccctcaatgtgggggtcctgatggtgcaggaggtcctgttcatatggcccagctgggacaggctggggcggtaggaggcacagctgagccctgttgaaatccatctctctttcctgctcttctggggtaacaggtgtagctaagtgtctccattctccttcctccttatactctctcaccttggggctcaagaatttggatgatttaccaggctgctgtgaaatttggtctaagaaacattgccttggttcatccttcaagatctctaccagagtccatattccatcgtatacactcaataggagagtgatgcttatagacaaataggtcttcaaaagtggaagttaataccaatcacaacagacaaggtgttgtatgattctatttatatgaaatgaccagaataggcaaacctatagaaacagaattctgtctctatgaatggttactgaggcctgggagaatgaggggtacaaggggaatgactgttaataagtacggggttccttttggatttggagtgatgaaatattctaaaattgattgtggtgatggttatatacttttgtgactatcctaaaaaccatggaatggtaccatttaaattggtgaattgtacattatgtgactaggtctcaataatgctgttaaaaacaacaacaacaacaaaaatcacccagaaatgaaagcagagcatctcgtttaaagttcattaagtgtgttacttcatttccttctacaacgtctgtggaatgccattgctgactaggcagcctgccacacatggggcacaggagaaaagagctcttggtcagaataatcatgacacagcagcaggaagcagccttgactgcactaatagcatgtcatgagcaagcagagaagaggcccagagcctggcagaggagcttgtgttgaacccaaacccagattttaccagtagggaaactccttagggagccaggctggggcatggatgttttagtagagctagcaccacttgaaaggttggaaaaatgagagggcagggcttgtttggggctttgcatgcctagataacagattatgtggggagagaccaaggagaagaggactaaagataagcagaagctgaatgaccccattccctgaacattcattcatctcttcactcctttattgagcctcacttgtgtcatgcagaggctaggtcagttgttctcaagcttggcttttggaattacctaaatctcacctcagtgatagctggtctgagtgtgctttgggcatgaagattgttaagagcctgggagattctaattttagttgatgttgaaattcagtaggctgtatgatagagataaagaaaaaattaaaaaaaagattaaggcagatatggtgctggcacctggtgtgtacaatcaacaatgctttctgagttgcctactaggtacgagatactgtgctgagtaaaacataagagtctcagttctcatgaaggttcagactagtggaaacaacagaaaataagcaagtgggcagactgagaagcttttcatcacaacatcagataactgatatgaaggaaacaggaaaggttaaaagatagccaataacgaagaaaaagatggctcattagattggctggtcaaggaagaactctttctttttttaacatttacttacatatgtacatataaatgcatacatatatatgtacaatcatcaacacaaattaccatctccaaaaattcctcatgccccactgtaatttttttttttaattttactttacgttctgggatacctgtgctgaatgtgcagatttgttacattggtatacatgtgccatggtggtttgcggcacctatcaacctgtcatttagtttttaagccccgcatgcatcaggtatttgtcctactgctctccctccccttgtcccccaacccccaacaggcctcggtgagtgatgttcccctccctgtgtccgtgtgttctcattgttcacctgtcacttatgagtgagaacatgcagtgtttggttttctgttcctgtgttagtttgctgagaatgatggtttccagcttcatccatgtccctgcaaaggacatgaacttattatttttatgactgcatagtattccatggtatatatgtgctatattttctttatccagtttatcattgatggacatttggattggttccaagtctttgctattgtgaatagtgctgcaataaacatgcgtgtgcatgtgtctttatagtagaatgatttataatcctttgggtatatacccagtaatgggatggctgggtcaaatggtatttctagctctggatccttgaggaatcaccacactgtcttccacagtggttgaactaatttacactcccaccaacagtgtaaaagcgttcttatttctccacatcctcgccagcatctgttgtttcctgactttttaatgatcaccattctaactggcatgagatggtatctcactgtggttttgatttttgtttctctaataaccagtgatgatgagtttttttcatatgtttgctggctgcataaatgtcttttttttgagaagtgtctgttcatatcctaggaagaactctttgagcaggtgacattaagccagcacctaaagtatgagtagaaactggccttggaagatctatggaagaatgttcctggcagtgggcacatgctgggtgcacgtgctgttgttgttgttactgttgcaaggaactggcacatattcagactccatgaggaaacatggtgtgtgggagggactttaatgtgtttataggctgtaatgttttatttatccgtgtatgtgaagaatcaaagatgcttgattatagttgctttataaatgcctatggaataaatgaactgatgttatcagtagagaagaagttgaaaggaaaggcgatggttgatgagttttccataggaagtgggaagagagggaatctacagtgcacagaaaaagaggtacctctgaggtaggaagggagaagtggagaatagatatatttttctggtgcagggacaggaaatagaatttccttctgatagctactgtgttctttattgggggaaaagagtttgtttgctgaaagcaagccaggtgggagtgggatcagggttctaaagaggtgggaagtgttactttgcataattagagaagtgagctggctggggacatttgtaagaactgaggtggtgctgagtgcccagccaggggtaggccagacatcaatggtggtgccaatggccatgattttggaatgatgtttacctctagcagatagctacatcttcggtggagaatttgcagatgggtatggcaatggtaggacaaagaaatgaacaaattgaagtggaaggagagacagatctaaattgatattaaagactagtcggagacatagaggaagtattgtcaagaaggagctgaggtcagacgcagtggctcacacctgtaatcccagctctttgggaggccagggcaggtggatcacttcaggtcaggagttcgagaccagcctggcaaatatagtgaaactccacctctactaaaaatagaaaaattacccagttgtagtagtgggctcctgtaaactcagctacatgggaggctgagacaggagaatcgcttgaattcaggagatggaggttgcagtgagcagagattgtgccactgcacttcagcctgggcggtagagcaagactccgtctgaaaacaaacaaacaaaagaaaaccctgaatataagaagaggaaggaacaagggataaacttctaatgagtccaaagccagatgtatgatgagaatgagggagtgagaggactgggagaaagagagtgccttgttattccatggtaagcactgcacatattaaagtactttaaaatataatagctatcttttactgagtataactccatgcctgcagaaaggctaagggttttatctacagaatttcatttaatcctcatagtatatattacaactccagttttactgatgagaaaactgaggcttggtgaggttaaatgtattgctcacattttcgcagctaggaagaagaaattgcctctgtctgatgaagcaaatgcccctaactaccgagctargtgatgttgatctatatctttttgttgttgttggagaacaatgcatgactcctgtatcctcctcttgtgagttgatgccccagagccagttatattaacacattcagcgctgcaagatgaagtccacatcccctagagtgacacaggaggctggtcagagtccatcccgcacccccttctctagattcaccctcccacaccgtctgctcctgcttgccccgactattttcaagttcactgaacacaccacagcagtttgtacctggtgctgtctgggtcggtgatgtccttccccctcttcttctcctggctggctcctccaagtccttcaaaattgagagtgagtgtcaccccctttccacttttctgagctgaaaacagtgaaagtactattgcttttcacactgggcaggtctaggtctagggcttctctgcagacctccaccataactctctgccatccctcaactccgcctccgtcacattaaaattctgtgatgctgactgcttgtgcattgttcatttcacaagctcacagccccttcccttttgtttagtatttcactgtctggaaggacccagaaataagatagaaagaggtgctgatagtagttagtgatagactttgctagcagcccggggaacacctggcttgtacctctaagtggctagtctggttaccacagcatccttttagcagtagactattttttttttaatgtagccagtaaattcaagatatctgtgaatatcaaggaacaaaacatctattatctaataaaacaatttctgacactcacttttgtaattcaaaaattaaaataactgtagctactattgctttatattaattgtgttctcgttagtagtgtgggtcactcagcagggtggtgggtggtttcgtggatgtggactggatgccaattaagaagacctggatttcactttctggttgggtgatggggcaaatatttttctgagcttctaattctttatgtgtaaaatggcagtagtaggagagcctcctcggcattgtttgggaggccaaatgacagcatgatcgtgaaaagccctttgtaaactgtagcgtgttttagaaaaaaaaatggtggtgatattttccagagcgtcagaggaacttaaacagcataggcctgcccctgtttgacctggaaatgctagttcagggaatgcattaacaacacagcaggaaacttgtgctgcgaactccttttggaaacagactgaatcctacagaatgaaagagaaacagcaaaccaaacctcacagaggttctccttgaaagatgaaaaattaactaggcactgtcgggggtgggaatgtggatggcggcgctggacgccccgtcttcagcctcccgacactttccttccccaaagccattttagtcaaaggtcatgtgtgtgtcttgtcaaaggccagcttccaatggaatcattgtcccccgggacagcggccccctgactacatctgcactggagaaatcccaaaagcaaacggccagtgcaaacaagagcagtccgcagcagccgtcccgagcacagctcccaggtcgcggggctgcagcccaggccgcgtccgcagcgcccgggcaggaacagacgccgagactcccgcagcatgacccgccacgccgatcgggtacggtatgcgcctctctctacccgtcctccattgcttgggctcccaggtcacagctgccattctgtcaagcagaaaaaccttgcaaagggcctccaggtttgccggaaagcagtccctgttgggctgtgttcccgtgcactcagctggagcaatttgcaggcgcgcaaatgcggagctcaactcatttcaagttttcattgccagagaatgagtttgtaaatatcgagtttgtctctggtttctggaaagcgagcccgtccaacttgcaggactctcggttcaccacggctcgactgcaagcgggcgaccctcagccttaccagccgcagggcactgcaagctctgccctcctgggcggcgagacgggcccggcttcttgtttattacctgtgggacaggggcttggcaagaaggacggggatttttaaaacaatatgtttagtaaagtcctctgaactcccacacttgcctccaggagacagaatcatctccctgaaggagggagccccttccccacaacgcgccgatcgcaggctccacaaagatgttgattgacgtgcacaattcggcacagycagtttcttggtcctttgtccttttctatttgaacaagcctttcaaacggatagggctaattttggataagactagagggagccctgggtcttaactgattatgggtgctttagatctggacttggaaatctccaagggcgaacactggggagcgtccgcaggggcagtgggcacagccggtcttcaggtgcggagagggggtcaaagggttccagcgattgctgggcttccacactctggtttcattttaacaagtgaagcaagagccgcttctcactgatagagggaatggaaacaaaagccgctctagtgcccagcaggatggagagggaacccgattctggtattgcttatgtatttatcacatacccagttccacggagcacaggttttctgcacttctgctcatcaggtatttaatggagcttccggtttcccccgcagtggtcacctctggctgccacctcagttttctgctcctcttcccaccaaattccttgaaagagtgggtggcatttgctgtctcccgacatctcctcactaccggtttgctccttcacacccagtcacctggcgtccgccctcacctctgagggccaacctttggcaaggccgccgaagacctccttgtagcaaaaccatagagcattttcaactccccccctcccacgcacacacacagcctctgtgtcattttgaactattggtcctttcctttctctttttgactctgtcctggatcctgcaatcccatgcttcccgggcttccttctgacctttgagttacaatttaatacttaaagggcttcacttcataagtgtttgtgtgcactgctctttcttcttgactctcttcccttgtcatcctgcagtctctctggataatctcattcactccagcggctttaaccactacatatacatggtgtctcccaaacgtagcctaatctttctcctaaaattccagtctctactttgatgttccatagagcaccttaaaatcaccgagttaggacctggatctgtcttctcccttcttctcccaggcctgctcttcctcttttctttgccactgcttaaatggcatttctcaagttgtccaagtcagacacaacagaatcaccctaggtgacttcttccctttcattcatgacaatcatcaccaarccctgtctgatctcattgctgagtataattcatacacatacctgtgtctccacctcccccaccactgttatacttatggccagtattccctcaaattccattctggccacaacttcccattagtctcatctggggccagtcctgcccagcccatacctccactttgtttctgcactgtgtcaaatgatctttctttcttttttttgagatgtagtcttgctctgttgcccagactggagtgcagtggcgcaatctcagctcactgcaacttccacctcccgggttcaagcaattctcctgcctcagcctcccaagtagctgggattacgggtgcctgccaccatgccaggctaattttttttttttttttttttgtatttttagtagaggaggggtttcaccatgttagccaggctggttttgaactcttgaccttaagtgatctgcctgcctcggcctcccaaaatgctaggattacaggcgtgagccactgtgcccagactgtgtcaaatgatctttctaaaatataatatgatcatgcagttcattttggaaaagtcttcagcagattcccatttttattttctttcaagaataattttggtggatacacattgtccacaacttgccttttaccttcctcttcattgttatatcttactactcactccctctccacattttatgtaccatttttgtacattttatatacattttgtccatatcatatatgaatttaggcgtgttaaactatttattaaataagactttctttctgtacatctgtgaggtctgtgtctaacctctgtttttatttagacccagctgaaagcccctttctcttggaaacgatgcagatcatccttcctaatgggttaggtggccctctcttgttcccccagagcttcctttatttctgtgggtcagagcacttaccattctttattacaaatatctatttacttgtccatcccacaccagtccttagggatcaactctttttgtcttagtatgattacagttagtgcttagacccaggtgggatgctcaatgaatttttgtgcaatttttgtgaatgaccatttatgtttaagcattgaattagatgacagagatacagaagctttcaggaaattatcatctataatatgctaaggaataaaggttaagcatgattatcagggaaaacatagttttctacttatttagcaatggaaggctttagactttctggatatttgagaataatgcctcgagtctgtgggtctatcagctccctctctaattcacatctcaacaggtgggcttctcctattgctactgcacctatcctaaccttccccaagaaagagctgcaagaaaggccttttgcagttttggctctgttgactttgtgaaggcaaaggaatcctctttagcctggaacctggcatgggacaaggacactaaaggcctagataggtgggcttgtaagagtccttggataagcttgatccagagaaggcatccagaacctcagaatgggccagtgggcaagcaagccctctaaaaactctgtagaaagtgatggagaatttgggatgctagagataagaaaatgcagttttgatttcctaaaaagagatgtgtgcaatctaaaccttcagacagaaaggtgaatgatgattaactttgatagggagttatttaaacttgaagttgttctcaagctstttgagaccaaggtccttctcaggtatagatacacactactcttctcagaaaaaaatgcaggatacaccacatattgcactttgtatgaactttcagtgggttcatgacaagtcaactctgagactcctttgagttgtaatgaacctccagttaggaatctctaatcaaaggaattaattaattccacagacatttgggagagtgaagtaggtggcgaatagtggagccagcataagtcaaattaggcatgctttcttttttgagatgatcccaatatcatgtgtgctgatgaccatgaactkggagtcacaggacctgggctcacatccctgctctggcaattgctacttgtgtaattttctaagagatgattttattatctattaaaaaacagtaataggtgctggaggatttaactaaaataaagtatgtgaatgcacctgaaacatggttatactcaataaactttaatcagttcacaacattgatttcaggaaggcacagatttctgtgatcttcttctrgattagaaaagtgcatatgggctggattaatgactggttgaatgcatttattaaaggagagctgattaacagatggattgacatgtgaatgtctttagtggcatgctactggcctctgtcttcattcctgtttattcagcatcattgatatctataaaggcataatataaggctcccatttgctaagagaaaaggcataaggattaggagtccaaaagttatcaataagttataatctgttttgacttttaatttttggggtgtatgtgtgcagagatggatataaaaagtcttatgcatggatcccaaaattaaattgcaaattactaggtatgtgtgtatgtgtatgacagaggcagatgggaagtagagggagagggaaagcggattgagaaaggaagagacagagagaggaagagacagaaagttagagagaagtggcagctttatatagttaaggtttagagatttaaacggatgataaaatcaatagtgatatgtttcttttaaaatagaattttgttgtagtaaaagaagtctagaggctgggtgcagtggctcatgcctgtaatcccagcactttgggaggccgaggcgggtggatcacaaggtcaagagatggagaccatcctggccaacatggtgaaaccctgtctctcctaaaaatasaaaaattagctgggcatggtggcaagygcctgtagtcccaggtactcgggaggctgaggaaggagaattgcttgaaccgggaggtggaggttgcagtgagctgagattgcaccactgcactccagcctgggcaacagagtgagactctgtctcaaaaaaaaaaaaaaaaaagaaaaagaaaaagaaaaagaaaaagaaaaaaaaagtatagaacatgagacatgatagtcatcgtactctgtattgttcagaccatatttagaacaattgtatctagttctgggtgctacacattaatttattagcaactgtattggctattattatttgagcacctaatatgtggcaaccactctgctagatgttggagacaacagtgctgaagaagacctgatctcacggtatttacaaaggagcagaggtgttaggtgaggaaccaggtgattttaattcaatattatacttgctttgataggggaagcttaggtcctcgtgaaaccacctgagaagggatatttaatctagacttaatgggaccagggtaaacattctttaggaagtgatgtctaaattgagacccaaaggctgagtaaagatgaggaaggtgaaggtgatggagggaagagagcttcaagcagaggtgtcagtaccttcagtgagctgtgcaagggactaaagaaggaatgcaagagaggggatgagagaaatgagactggagtggtggctgaggccagaatggcatgacactgtcctacttgaagctgtaattgatctttacgaaaatggggagccaatgaagcttgtaagcagggcagtgtcataatcggtttggggtcttggaaagatcaatctggctgcagtatgaacaatgagttggaaggatggctggtaagacagagaccacttaggaggcactgtgtcatataagcaagaaaagatggtggccctaaaccaaagggtagcagggaagatgacaagagtggattaattcaaaagtgaattaggagttataagagtatggtgacagactgcaggaatgctctaggaaagatgggtacggatatttaacctgcaaaagagaagatttagaaggtcacaatgtctgtctttccctctaatgtggagggagataatcattgtgtttgtctttgagagggcaggatgaatgaatgaaagagccaaatgaataagagacacaaggagatacatttcagctcaatacaataaagaattttctaacaggcatcccaaggcaatgagttctttgtcacagagaaatttaagcaaaggcttgatagcaattcttggaaaagttggagaggcaggaatatggttagccaggctggaaggcattgacatttcttttcaaccctaggatttcaagattctgtgtataaagttcacatatctgagcttggtatttaaggcatcctgggatccagtcctttgttgggtggccatatgtcctggtttcctggtatggtcctagctgtttcctgcagctattaacagcagcctttttcatgcttgaaggggtcttagtttgaacaataaattttatgaccatccagccctacgacttgattttcctacctcgacccctgacattcttttagaactcccatgaactactcatactaaactatttgttgctctcagagtagaccaggcattttactacaagttggtttacttatgccatttcctgtgtcaggaatacccttcctctccattgtctgtgtacctcctggaaaatataccttttcattaagtcctaatctaaatcaaatgctaagtccttcattaagctttttttttttttagacagttttgctctttttgcccaggctggaatgtaatggcctgatctcggctcaccacaacctccgcctcctgggttcaagtgatgctcctgcctcagcctcccaagtagctgggattacaggcatgtgccaccacgcctggctaattttgtatttttagtagagatgggttttctccatgttggtcaggctggtctcgaactcctgaccttgggtgatctgcccgcctcggcctcccaaagtgctaggataacaggtgtgagccaycacgcccagccttttttctttttaaattgtctttttataatgtgataggttgcattatattactgaatatataattatttttatacttttttgagccctttccctaaattatcatctcctaggagtaagatactaagatctttgaaaaatacagtaacccattggaatgaatggtgctttgtttgaagcaataatctttcagaggcaaattttcgwtttttaaaaaaggtcatattttcattatatgagtgatggatgcattttgtggaaaaaaaatcaaaaaaggaaagtacaaagaagaaacaaaaattatctacaatctcactatttagagataagtatattaactcattaatgaatatcccgtctatattcttttatgtgtatgtagtcttaaaattggaattgtccatagccttgtgtaacctgcttgtctttaacagcataccacgaatattgccccatgccattatatatttttcaaaaacataatcttcaatgggtgtattgtattctagatgtagctgcctcatgatttgtttggcaaactcctgcttgatatcaggctatttccacatttttgatgttgcaaaaagagctataatgaccaactcccaagacaaacatttatgcatccatttggtctgggacatttatatttttctaagatggcaaggcaattattgatggaaagaaggatattgagtcactaagaaagcatgagttaaaaaaaggctaactttgcttttaaaatgtcatttttattttatgttacatatatcaattacatatgagatttttacatatgtgtatatacttattagtcctataaattaatgaaggtgccttgtccaatttggaaatgtgtcaacaatctgtaggcttagtacagaagggattgataactgataagtaaacttcttgaacaaaaaattgagtttgaaatctaaaaacttcagtgcctttgtatcaatgtgagacataatttcattcataagctaaatataagggaaaatgacatgtttgccacagaataaaggcatttctgtgaaaagaggggcattgcactgcctagtgttttggtgtttggagaaggtatgaggccacagacttgaaaccttattccaaagtaaataatttatcgtcttaaagacccaacaagcaggaaggtgtccattgtagagtggaatatttttatctgaggagaagcaggctttgggatacactgtgaacccatttgaccactttttaatagaataaacgaaagatgttgttatgggttgaattgaatcctctcccaattcaaatgttgaaatcataatccccagttccttagaaggtgaccttatttagagacagagtcttcagagaggtattcaaattaaagcaggtcatgaggatgggtcctaacccaatatgactgatgtctgtataaaaaggagagatttaaacacgggaacatacacagggaatagatggccatctaccaagccatggagtgaagcctcagaagaaaccaatcctgctgcccgacaccttgatctcagacttctcatctccagaatgtgagatgatacatttcattgtctttttttgttgttattgttttgtttttgttttggctcactgcaacctccacctcctaggtttaagcgattctcctgccttagcctcccaagtagctgggactacaggcgtgttccaccacacccggctattttttgtatttttagtagagatggggttttaccatgttggccaggttggtcttgaactgtgacctcaagtgatctgcctacctctttctcccaaagtgctggrgtaacaggtgtgagccaccgygcctagctgatacatttcattgtgtaagccacccactactttgttatatggagttaactaacccacatttcttgaaagcataatgtccttagcatggtttcagctggtaacactcagtacaacattatttcactttctagtcaccacagagtttgctcttcgtcatggaaatgatcgggacagacagtgctttgcagtttcacggcttgcaaatcattttcatttccattatctccttgaccctgaccaaagcgtgtgagatgggaattctcatcctttctgttttagagagagacaacagaggttcagagaggctaagtgaattgttcaaggctgcacagcttggaagtggtagcgctgaaactcaaacatggatctcctgatgcgaaatactgtgctcttttaattaaaacttaatgtgttcgtcttcatgaacatgtcaaatatcatcttccttctctgaagtttgaaaagacatagtttgtagcatgctgagccacttttccccatttttataactttcataagaatgattttataagccctcttgttggactatatgtgaagcctgagggcacctactctgcctccgtcatcattatcaaatatttaccaggaatccttgatttatgctcctgtgtttacttgcaaagaaaatttcgtctccacttaggagctttgtttactaacaaaataggctttctcagtacacagtttgactacccacaaatccaactgcaaaactttggatattttggatatattcgagtttttccatcattaatactcttcagatattaattcaacatagtggcatgagggacgcctacattttcctggaagctgcttgactttaatcagcaggtacaaatgcaagattatcgtacttttcccttgggtgacctaagctttttcttggcacccgtgagtgcagagcacttggttgtctcagagtgtttcagtggcttctacacaggggagttattagtttttaaccttggggataattccataagaatgcaattcttttcctccctgacagaacaaaatattgcttgtgttaggttatccctgttatgcaataaaaccagtggttcccagatggtgaaactataagagatctataggtagggctgttagatttagcaaaaaacaacaaaacaaaagagacaaaaacaataaaatcccaggatgccccagttaaatttcagtttcagataaacaatgtatacttttttaggataaatgcatccctgatattgaaaatactaaaaaagtattgtacctggcagccctatctgtaagataattttgtgggtggagtcttaataatttttcgatattttaaaagtctatgaaaattatgcatttacctaagtaagacttcagaggttactgacaatgtgttaaatttcctcgagtttggttgggattttgttttttgacctaacttgaaaaagcactgctcatctcgtgggaaccacgacaattatactacccattttcttttcttttcttttttctttctttctttttttttttttttttgagacaagagtctctcactgtgttgcccaggctggagtgcagcggcgtgattttggctcgctggaacctccacctcccaggttcaagtgattctcctgcctcagcctcctgagcagctgggattacaggtgtgtgccatyacacctggccaatttaaaaaaatatatttttggtagagacggggtttcaccatgttggccaggctgatctcgaactcctgacctcaagtgatcctcccgccttggcctcccaaagtcytgggattaaggcatgaggcactgcgcctggcctatactacccgttttcaatgacttagattctaggggtcatgcaaagcccatgcattatctcttgcaacgctcaaaatcagggattggttaactatggcctgcaggccagatattgtcctgcctgtttttgttgttttctccagcacgtgtcaaagttttgtttcacacttgcaaagcaaaagacagtgaaaagaaaaagctggttcacagaaacagtcttaggaaagggccctattagaaatagaaatatgtagatctgtaaatctcaaatttcagctgcatcagaatcacccggagggcttgtttgaacacctgctgctgagccccacccctaaagtttctgatccagtaggtctggtgtgggcagaggatttgcgtttcgaactagttcccaggtagtgctattttgactggtttgggttcacactttgagacccattggtctagattctaaataaaattatttatttatatatctatgcaatttactttattgtttatttatttaattgacaaataaaacattgtatgtatttacgagatacaacatgatgttttgatacatgtatacactgttgaatgtatacatataaaacaaactaacattagtttatcamctcacatccttatcattggtgatgagaatatttataatctgttcccttagcaattttcaagtatataatacattattatgccctagtcaccatgctgtataatagagtttgagaacctagtcctcctggaggaataagatatcttttctaactaaaactttgtaccctttgaccatcaacttcccatttctcccacccctaggctctgtaaccaccatcctattctctgcttgtataagtttgatttttttagattccacatataaatgcaatcatgtggtatttgtctttctgtgcctggcttatttcattaagtatcatgacctccaggttcatccagattgtygcaaatgacaggctgtcattcttgtttaaggctgcctagtattccattgtgtatatataccacattttctttatcaattcatctgttgatggacacttaacttgattccatattttggctattgtgaataatgctgcaataaacataggagtgcagatatctcttcaacgtgctgatttcatttcctttggacatacacctggtagtgggattgctagatcatatggcagttctatttttgattgtttgtgaagtccctacaccgttttccttaatgattgcactaatttacaattccatgaagagtgcacaagggtttccttttctccacacccttgccaacacttgttgtctttctttgttgttgtttttgatagcagatattctaacaggtccgaggtgatatttcattgtggttttgctttgcatttccctgatgattagtgatgttgagcagctttcctgtacctgttgrccttttgtatatcttcttttgagaaatgtctattcaggttcttcaaccattattttttattttactttaagttctgggatatctgtgctgaacgtgcaggtttgttacataggtatacatgtgacctggtggtttgctgcaactatcaacccgttatctaggttttaagccccacaagcatgaggtatttgtcctaatgctctccctccccttacccctcagcccccaacaggccccagtgtgtgatgttcccctccctgtgtccatgtattctcattgttcaaccctcatttaggagtgagaacatgcggtgtttggttttctgttcctgtgttagtttgctgaggatgatggtttccagcttcatctttaaatcaggttgttttcttgctattgtatattttggatcttaggcccttatcagatgtatggcttacaaatattttctgtgaatatttccttgggttgtcttctcactctgttgaaggtttcctttgttgtgcggctgccttctgtttgtgtaaataaaattttaatggaacatagctacccaatttgtttccatacagttcatgaccactttcgcactacaacagcaagttgagtcattgtgacagagattgctggatggcacacaagacctaaaatgcttttctggtcctttacagaaactttgcctacaactgctcaaaactctcwttgaagctgtactgttattctcatttttagaatgaaacaagtggaaaactgaaacttgagaaaggtctcacggttcttagaattcaaactaagatctgtttgaattccaaagcttctgctcagaagctgacccaagaggggctggttgtttgttacctttgtcctaaattgataaacaaaggggaaactgatttgtgacttcttgttaaatactgtccttttcaaagacaagacagatggtatggtgtagtggtaaagtgctcaggctctggggccacactgcttacatcccagctcccccaatacattcctctatatctcagcttctacccctatgaattacagataatgatagtacctatttgcatgattgttgccaggtttaaatgagatcatgtctgaaaagaaattacaagagcacttgacatgtggtccacaagacatttgttattttaatttcaaataactgttttttcaaagtaaggacgtctatggaaatgaaaacaaagagtgtggaaaggttgttaaccaaagcatctcctgtggctggttgttagaacatctccactaggaagtttctacagcacagtggcccctcctttttagacgatagctaggagagatacattttcagcttctcaatatttatatttatacttatactttggcctgtccacatttcttagtcccttggccagccagggttgccttgaaaaggcctgtggtgagataagatgtttatccagtgattgctggaccctgaacctcttattattgttacccctgatatttatagtcccaatatccattcccagtgactccagattgattaaaaatgtagtcagggctgccagaaaatggccttcttaatacaagacaagcaattttcctcagaaacacctccatctataatttgatccttaggcaaaagaaagaaaagcaatcagttttttcaccaatattcttcaccctttgaagcatattttcttatggaatcactaggaataaaatctgtgtgtggtgtgttaagcatattagaatggccttgatcatctgaccagattaggagataaagttgttccctgagagggatgggaatggaaggctcaagacattgtccatgaactagtcaatggatggatatgatgtagtcaaagtcctggcagggaagcctggaggctttgctgaagtgaagcctcatgaatgcatgaatgtgtgtggataacatcagcagggttttgtaatttttccagcatgttttgggtgccttggaacaggggtaagaaaatagtgttatttttctagggttagggattagtaccactaggaagtgagaaaattcttaagaactctggtttttttttttttttttaattgagacagagtcttgtcctgtagtccaggctggagtgcagtggcaccacctcggttcactgcaacctccctctcctaggtacaagcaattcttatatctcagcctcctgagtagctgggattacaggtgcacgctaccacatctggctaacttttgtgttttttttgtagagatggggttttgccatgttgcccaggctggtcttgaactcctggcctcaagcaatctgcctgccttggccttccaaagtgctgggactacaggtgtgagccactgtgcccagccaagaagtctggtcttgggtgcctaggttggggagggatggaggtagaagggcccagcaaccctgctgccactgacagagaataaagctgcaggcagttgcctgatcccttttctcctctgcctcaaccctccacactccagttatattttccttcccttttcttcggcattctcttcctttgttaaatkgttcaagcaatattagttgaacatccctgtgtgccagggacagtgctggggtttggggacttaatgggagggacatagacttggtgtctacactggtggggcttatagtcctgtggcctggggtgcagaatgtcaggagttgggtaagtgctcaaggcataagcataggggagagaaggatgaatgggaggggataaggtggtcagggaaggtctctgtctggtctgagaactgaggatcctctgaaagcagaggtggagaaataggaggagttatattttccaaaattagccagctagtaaagtggcagtgctgaggtttgaacctagatgtgcctgactctaggaaatgtctgcttttagcctgggcaatacagtgaaacctcttctctacaaaaaattaaaaaattagctggcatggtggcacatgtctgtagtcctagctactcagaaggccgaggcaggaggatcccttgagcccaggagtttgaggctgaagttagctatgattgcaccactgcactccagcttgcgcgacagagctgagactctgyctaaaagaacaacaaaaacagaagccccagtccctaccattacacaggcaatatccacataacaaacaagcacgtggaccccctgaatctgaaatacaatttttgaaaaaagaaatataaagtatttaaaacaatacctggcacatagtaaacacataatcaatattacgtgttattattttaaaaactgtttacttttcactaaatcttaacaaaaacattaaacttcctctgcaagcatctatatgtaactgtattgtgttgccgtgaaggaacttgaacagcaacaagacaaaaaatcattcattcacccattctaatcatttactatggatgagccacgttgtgtgtgtaaatgcacaaggcaaaatcctattgtgcagctgtgagcaccaatgctgaggaatgctgagaaaagcattgttagcytgaggttggggcaagacagcaagagtccacacactcttccaattcatcacaatgaccccttcacgccataggatgacagctctcattgaaatgcagggcatgtacatcccacttgttgattcctttcattcctagacaaacacacgtctaataaagaggcacacatgtctgtccaggtcacaagcctggttgggaatgcgggtatttcagagaggttaggctgatgctagcatgttgctattgcatcgtgaactttgaaagtcctttagcactaagtcatgttgaccgcatcgctaattacatgctgcagcccactgctaagggacgatgagaagaactggaaattagaattggcagacttcgacatacaaagttcaacactttctaagccagatattgtagaactttcgggagatgatggagatgaaatctctgttcttgggaaactttcagtttagtaagaagaatttccaatagaacaaactcaatagaggaggcatggtatggtgtaaaaatcatggactttgaacgatgcagactgggttkaaatcatttctctaccacagactatgtggccttgatcaaattatttcatctttctgcgtcttggtttcttcactcataaaacgagattatagtctagcagcggtggctcatgcctgtgatcccagcactttgggaggccgaggagggtggatcacctgaggtcaggagttcgagaccagactggccaacatggtgaaaccctgactctactaaaaatacagaaattagccgggcatggtgggtgcctgtaatcccagctactcgggaggctgaggcaggagaatcgcttgaaactgggaggcagaggttgcactgagccaagatagtgccattgcactctagcctgggcaacggaatgagactccatctcaaaaaataataaaaataaaataaaataaaaaacgatattatataaatacttcatgcaattctataactaccttaatagatggtaactattataatcattgctgtgatattgattactgttattatcagaatatagcaaattcctgctgtatcactgatgtggtgactgcacaaattactcaaactcttcacctataaaatatgataattctaactgccttatttgtgtaattcaggagataactgtattctgccattaccaactaatatatttatatattttctgttttattccatccaataaaatgtaagctctctgagcagggacttggattcttgtgttagttactggactcttgtgcctagaacagtgcctaggccatagtagattctcaataaagtatgctgctgtttaaataagtggacaaggaaataaatgaatggtcaatcttatgttaaatgttcagcaaatggtaggctcttggtacatggtagttgttactgcgcttagtatcattattatgattagaatgtggtgggtgccgtgagaggaacgaatacagagagatcgctcccagctctgtcagttggtgatccttgttcttagcactggcatgtcatcaattgtgttgtagttgggagaaacaaccaggccattgtcaatagtaaggtcacatgagattaattgcaaaaataagggtttctgaatttttatcagttcttaggaggaaagggaaatagctgcagaaagggagggaagattgaaaaaaggagaaaaacagcatcttttgcaaaatattttattacatgaggccataggctacaagtctgtgatcaggatttacccagccccaaacttagaaggcatgcaaaaccagctgcaccagtcagatgacacaaagacagtattggtatagtggctccaacctgcagctgggagcaaaatgagaaactgtccgtaagagaatcagttctgcttctgaacttttaaagtgactagggaaaaacttctcaactgcccctcacttgagagattggaggagtttcttttaatagtaataaaactaaatgtcccattgcatagtgtgctgttgcaagaaatacctagaaactgggctctggctgggcggacctgaatttgaatgacctgaatctgtcccgtgctaggtatgtaaatttgggccagttacttaaacttttgtgagcccctgcaaaaagagaaaccagtatgtattttgtaagactgttgagagaattcagtaagataatctctgtacaacatctgtgacattttagttcttcgaaatatggtggctactattattagcaattagtgctacatggattattgtatttaattcccacagcaaccctatgaggaagggattatatgcattctcatttacatatgaagaaatgaaggtccagagagggttcctaactcagtcaagtccatagagctagtgagcatccaagtcatgattctaaacaagccagagagtccagattttcagcaattaacaagttgtatagcatctctcataagagcaatggaagcttagcagggcaacataaggtccagaacttccggcattctcttgcataatactctgttggcaatctgaggtaattgtatttcaaatatgcggtgactctctgtttacaaaggattatgagagacacagacgtgtcagagaggcaatgtcaggtcaacttggtcagcttatcgtatgtctgtcttcttgatcaatccaaaaaaccattgcttcatctcttgcttaagtccatcataggattttgtgaaatgtgtttctttcttcttttcttagcttacccttgacaagtgttctgtgtatttggcatacattaaattgtgcataccaatattttctttctctctctgtttccttcaggaggtgaaatagtaagaacaaggtatgtataaagatccttacctttccttttgatttatccaggaaaaagtaagaccaaattctgattatttaattgaatttgagtaactcttttttggttattatagggagaggactcagctctctgagagagtttaaagaagacagagaaatagtagatgcttagagttggaaaraagcttagatgttgtatagccaaagtgcttctgaattcagatactttttaagaaatcctgactaccaccacctagcctttgctgaatagtgactgttagttcattttttataactatttcattatctctttcatgagacaaaatatgcttctctgtaacttctagttttgcctagaaaaagcatgcatgggagcctgggtatggtggctcatgcctgttattccagcactttgtggggctgaggcgggaacattgcttgaggccaggagttgtagacaagtctggacaacatagcaagaccctctctctcactctaatatttattatatatattaaatatataacatattatatataataatataaatttatattaagtttataaatataacaatataaatttatactataaatattttatattatatatctagatattaatatctagatatatctctctatataatataattatatattaaatattatacagagatatatctctatatataattatatattaagtattatatatagatacatctatataatattggtattagtattataatataatatagatatagatatatagctatatcttttatatctatacataatagttatatatctagatatataatacatgtaatatatatagaatacctaatattatatatagatacttatatattatatctctgtatataatattatatatctctgtacatgttatatagatatataacacataatatataatataatatataatatgtctctctagataatataacatataataaaatattatacatatataatatatttaatatataatattttctatagatatataataatatgtaatctattatattacatattatatatagagataaaaaatatatagagagatgcataataaagcctgtgcattttgcattaactttcaaacgtttgaggaagggcaatgcacacccaccttctcccctcatctacgccacacgttcaggctgcacagtcacaagcgtgctcattaaatatccatttcctgaacagcagtaagagtgagacttttgaaacataaattggaccatgtcattgtctgattaaatccctccagtggcttttcattacatccaacatgaaacatgaagcctccattatggcctgtagggtcctgcataaactagctcccaattacttctttgacattgtctcttactgctgcctcgtctctcactctgctccagccacactggcctcactgagcacattgggctgctcctacttcagggcctttgcacctgctattttttccaagacacctggcttccccctcatgtcatccgggtctctgttcatatgtcatccctttggagagatctttgttgctgcctaactgaaaatagctccactcgttactcctctgttttcttgctcttgtgctcttttttctttatcgtttatcagctacttgacgttattttcttctcctactaaaatgtgggattgctggggcagaggctgcatcctcaatgcttgacgtatactaggtgctcaatagaagtttgctgagtaaataaacaaatgaatgagtgaattaatgaattggttgggtgataaggacctctcctcatcctggtcatgcctctcttaatgctgtccagttttgtagtgacctcttaaaacgagctatccagaggtgaacacaatctagacggagtctggctaggctcagctgaaacattcccctcctggatgtgggcaggaatcattattaaagaagcctaggataaaatgaagtcatttagggtggtagccaaacatgggcttctatagagcttgcaggtaacccaaatgcctgggtttcttttacaagaattgctgttagtgctggtctctcctagtgcaaagttgtatacctaaattttgtattctgcttcaagaatgttgtcccagatagatagatctggctgtctcgctcagatcttattttttaaactcttgatttcaacctgttgatatatttttgaattttgatacagtccatggtacattgtatgtggcagctacctatcactggaatattgagttcaagaacatatcttacatctgtgattcaggaatcaggaggctaccatctgtgtcacctccacaggtgtctcttgatgcttaggaagctggagaatagatactgaaataatattgcagaaaacctatcatttctgatcttgtttgcacagataaccagctgaaagggacaggaagagggatctcaattctgctgtccaaatctcatgtgcataatgacaatctcaggagcatagttggcagagtctataaactgtttctataacgatttctgcaaaaaatctgcaggacactaaggcagcctggatgtgggatgaatagattgagggagccaattctcaggatatggcatcttaacaaactgctgacttcctgctatgatgtgaatgtttatgtccttcccaaattcatacgttgaaatcctaactcccaaggtgatgatataaggaggtggggactttgggaggtgattaaatcatgagggtagaggcttcatgaatgggtcaatgttcttatataaaagaccccacagagacccttacccttccataatgtgaggttacagtgagaagacagctttctatgaggaagtggggtccttaccagacacagaatctgctggtgccttgatcgtaaacctcccagcctccagaactatgaaaaatacatttatgttatatataagccamccagtttatggtatttttttatagaagcatgaatggactaagatactttaccatctcccaattaaaacacacctttcatctcactatccttgatatcaagcggtacttgacacagcgtaagctttcaataagcattagctaatactgcagtggatgcttactaaatctgtattgaaccactattatttgaatttggaaaactctggtttccaaaatttaggcaattgtctgataatgaccagcattctctctgagatcttaggattttgaaatgacatgtccaggatgcccaaggttctggtcactttttcatttgcaacctattctttttgggggtcacaagaaggtcagcttacaacaaaggttaatctgtggctcctattatcttctgaattaggaaacattatcaagtatcaagactcatcaaacatttactagatcctctgcctttagtagactcaggtttctttcagcacacagttgaaattcccattcctttgaggtcttcccagttttgtaattcttattgggaaatcaagagaaaagatgattcccccacttaataggcacttgaacttgggcaagttgtttgatatatttgaagttgttttcatatctattcacaatgataatactgtgaagattttataaatattaaattatgcactatgtaaatgtccccagtaggttgcctggcaaagtgcaaacaattaccgaatactagctaccacttaaaagaatgtctgttccatgtcaaatgtggtactatgtatacatgtttgctttttcctttctctactccctttctgaaatttttgagactttgctcctggaatttcctctgcttgcaatgcccttcccctctttatcaacttaaaaatcccctatctataatttaaccattataatacatgcccatctgccatatgagctgtcctgatctccctgtcagaggtcctttagctctgtgacatatctatggacagcctttctgttttattgattgcaaagttggaagagtgagtgagccttgatctatctgacattaactctagttcatagggcttttttttttttaaagaagtattctccaaatgaaaggtattattgttcttaaattctcacaactgccccacaaactctgtttacagtttgttgccattaagtttcaggatacttgagatgtgtacgcaagaactagggtctcttctaggctgttttatttaaaagtaaaatgaaacagaaaacctgatgaaagagatatggcagagggccaagttgctctgacaaactcccagttcttctaattctgggggatgcagagggtttcatcacacacacaggggctcgttaagagcagtccacaccatgactcaaatgcatcagtcctcctgttaatcatcaggttcagaggataaccgggttgactctggggacaacgttgaatgcatgaacctgagaactgaaaatcagggttaatgttccttttctgtgcatccagatgctttggaatttgcttctctgcaggtataatctcggttcttttttaaaatagcttttttgggatataatttatatattatacaattcactcttttaaactgtacatttcagtggttttaaatatatttacagagacgtgcaaacatcaccattatgcaattttaggacatttcatcactccaaaacaaaaactcatacccgatatcggtcaataccccatcatctgacaactgctaattgaccttttatcccctgtgggtttgcytcttctagatgttttatataaacggaatcataaaacatgtggcttttgtggctagcttctttcacccagygtaatgttttcaaggtttgtgatgctgaagcacatataagggcttcattcctttttattgctgagtaatatttcaccgtatggatataccccatttcgtttatccattcatcagttggtaatgctgctgtgaacatttgtgttcaagttttgtgtggatgtatgtttacttcctcttgggtatatacataagagtggaacttttgagttatatgtgtaactctatatttaacattttaagaaactgccaaactgctttccaaagtgactgcatcattttacagttcatgtttccacatccttcctaacagtttgtattaactatcttttaaattttagcatcctagtgggggtaaagtggtatctcacagttttgacttgcattttcctaatgatgttgaacaaactttcatttgcttattgttcatttgtgtatcttctttggagaaatgtctattctaatccattgatcattttttaaaaattggattatatgtctttttattgctgagttgtaagtgttctttaaatgttctagatatttgaacattatcagttatatgatttgtaaatattttcttccaacccgtaggtcatcgtttcactttcttgccatattgacaataatgtcttccgatcatgaaaaagcagatcttcccaaatttaggtcttctttaatatatctcagygattctctctaatggttagtgtgcaaatctcacttattttgtcaaatttatttctaagtattttagacctttgactattataaatgcaattttcttttcttttcttttcttttttttttttttgagatggagtcttgctctgttatccaggctggagtgcattggcacgatctcggctcactgcaagctccgcctcccaggttcacgccattctcctgcctcagcctcctgagtagctgggactacaggtgcccacgaccacacccggctattttttttttttttttgtatttttagtagagacggggtttcaccgtgttagccaggatgctcycgatctcctgaccttgtgatccgcccacctccgcctcccaaattgctgggattacaggcatgagccaccgtgcccggccataaatgcaattttcttcttaacttttagattgtctattgttagtgtataaaaatacaactgatttttgtatttttgtcttatatcaagcaacattcatgaactcattagtttcactttttatttttggtagattcattaggattttctatatacaagatctgtgaatggagatagctttatttcttccttcccaatttggatggcattcatttatttacttatttgcctaattcctcaggctggaagtacaaagttgactagaagtggtaaaaacagacatttttgtcttgctcctgatcttaggggaaagcattcagtctttcaccattaaatatgatgatgttagctctggactttttgtagaagccttttatcaggcagaggaagttgtcctctcttcctagtttgttgaatgcccttcactgttgtatgattgcaaggggaatcacagaaatggcagttttgcttcctccctgagagagttccattgtgctggtaagcacgtgatgacacctttgcagcggcaagtgtaaacttccttttagatttgaatcgaaacacattcattgagttaaatctcaactttttggggctttccaatccaagtagaggggctttattattgtggttgaaatgtgtccttcaaagctgtttccagaatcaccctaccctttgccacataagagctgctcattttctcataaggttaaaaagaatgtgaaaaaggtggattgaaacatttttaactttacttacatataatctctccataaataaagggattttcttagaacccatgtcactactaagcactctatgcccagcactttagaagatgctgagagcacgatagcagatgacacagaccttgctctcttatatatagagtaatggggaatatttgtttattttgtgtgttttagcactgaggtacttgcttaacatgcattattacatcatttggtcttcatatcaaccctgtgtgaaaagaacaattattttttaaaagaaactcatgttttagagaagttaagcaaggtctcatgcttgaaacaggcagactcaagtcagtgggactccagaatccaaacttttctttttttggggatggaattttgttcttgttgcccaggctggagtgcagtggcatgatcttggctcactgcaacctctgcctcctgggttcaagtgattctcctgcctcagccttccaagtagccgggattacaggcgcccaccaccatgcccagctaatttttgtatttttagtaaagacgggattttgccatgttggccaggtcggcatcgatctcctgacctcaggtaatccacccgcctctgcctcccaaagtgctaggattacaggtgtgagccactgcgcccggccacagaatccaaacccttattctctatagcacattgcttttttcccctgctctctaagaatttatgctcttattcctgagacaagaaatactgaaaaaacagggaaccctaagagagaaaagtattcattttaagattttatttggaaacaaagttttaatgttaaaaaatatggctaaaagccacttagcctgctaactctcctttacaagtgaagaggcttgggtttgcagtgacaaagctagtgaataacagaggaagtactacaagtcaaatttctttgtgccaagtagttcacttgggaaatatttattgtgttcctattatattccaggcagggtgaaaagctctgtgtagtgcaaggataattggtccctgcatttggagagatcaaaagggatggagctgccttaaaagaggttgcagacgggctgggcgcagtggctcacccctgtaatcttagcactttgggaggctgaggtgggtggatcacaaggtcaggagttcaagaccagcctggccaagatggtgaaacctcgtctctactaaaaatacaaaaatcagctgggtgttgtggtgggtgccggtgatcccagctacttcagaggctgaggcagagaattgcttgaacccgggaggcggaggttgcagtgagccaagattgtgccactgcactccagcctgggcgacagagccaaactctgtctcaaaaaaaaaaaaaaaaagagagagattacagacaatatggtaacacagttcattgttgttctgtgtgaagatgagggcaaaactggggaggctcacagcggagtgacacctgacttgaattttcataaatatgttggtatttgccagggaaattaggtggagaagggcattctaggccaaagcaacaatgtatgttaaggaatggaggtatgaaagagcacaacttaatcaaggaacagaaaatagttctctaattaagaaaatttaacatttatgaacactattctatgctgggcattgtgctaggtgatttacatggattatttcatgtaatactctcaagaatcctatgagatggaaacagacaagaaaactgagttttaggatggagaagtaatttgcctaagggtyatataaggtctcacagttaaactgtggtsgagctgggatttgaatttagggagtttagttttggatctagggtcctatgagcctggttaagcagcttgaatttaccctctaggtcagtggtcctcaaactcgcatcagaagcacctggtggagttgcgaaaacagattctgggctttaacccagagtttctcattcagtaggtatgaggcaggctccaagcatttgcacttctaacaagtttccaggtcattctaaccctgctcatccagggaccatactttgagaactgctttgataggaagccaaacagaaaagttttaagtttaggaggaaaaggctggatgcgctggctcatgcctgtaatcccagaactttgggaggccgaggtgggtggatcacgaggtcaggagatcgagaccatcctggctaacacagtgaaaccccgtctctactaaaaatacaaaaaaattagccgggtatggtgacacatgcctgtaatcccagctacttgagaggctgaggcaggagaatcgcttgaacccaggaggcggaggctgcggtgagccgagatcgtgccattgcgctccagcctgggcaacaagagtgaaactccatctcaaaaaaaaaaagtttagaaggaaaatcattagatttgcatattgtttagggctttctgggtaatgaatgggaataaattataaaagagaacttaatgaaatggtggtcagaggggacagagagtacaaacaggaagagcagttatgaaaagaccttttttttttttttttgagattgagtttcgctcctgttgcctaggctggagtgcaatggtgcgatctcagctcagctcaacctccactccccgggttcaagcgattctcctgcctcagcctcccaagtagctggaatgacaggcatgtgccaccacgcccgcctaattttgtattagagatggggtttctccatgttggtcagggtggtcttgaactcccaacctcaggtccacctgcctcggcctcccaaagtactgggattacaggcgtgagccaccgtgcccggctatgagaggaccttctaatgtgtgtccagaataatgaagctgaagggatgaacctaaacattatcacataggaagaaaatttaggaactaacagcacctgataaaggatggcagtagttgtcattattaactagaatctgtagatatggtgtctggcaagaaacaagagaggaaaggattgaaatgaacaaaaagtgagttgagtttaaggttttcctgaaaagaaatgaaattgggagggtgaacttgttgtgtaggtagctgcgttttggacgtgttgagtggaggccctcgtgtggtgtagtagagaggcatcacgctgcggcggaaagaggactgagctggcataggagacctggtttttagaactggctcagtcaattatctgaccgttctggagatgccccatactcttcgaacctccatttctttctctgcaagtggagtttgtagcctgcctatgtgagtgagactggagggtaaaatatgggagtcgtcaaccctagggtaaaacttttggtaaaacagttgtttttcctaattatcctgtcactcatttgtgttcatatatcacatagtcacattataaagtagactcaaaaatgaaaaccttcatgtggtttacaagcctgctagcgactcagcccttctgaaaggggaaattttctccattcatctggacacttagcatgcagggtttagagtagctgaaaagaaatagttacattgagttttgaattttaaaatgttttattatgagctagagttaggaacaaagctgagttatttcctagggggaatgctttttaaaacctcaatatgaataaatgcatttttagtgtttaaagtccagtatatatatatgtgtgtgtgtatatatatatatatatctatatgtgtgtgtgtgtgtgtgtgtrtatatatatatatatatatatatatatatatatatatatatatatatattttagtaatctccagtcacagcagaaaatggtttaaagctattagctctgtcccttattgtaactatttaattctagggtgttagcaaatggatacctatccccatgtctttcttatgatctaattgaaaagaagtgacttcactgagtatatatatggtcatcataatcattaagtatctattaattcaggagtcatacttaataccttcctgcccctcaactcccatatccagttcattaaaaagtcttttttcctaactcccccacttgtcttcctctccacgccgccatagcctcctctgtgtaagctgtcatgatcttttgtctggcttactgccagagtttccaaactgatctgctatatccattcttgactccctctgattcatatctacaccgtgcagagattaatgcttcaaaatctgattaagcctccccctgcttaagccttttaagggctttttgttgcctttagggtaaagacaatatcacctaacatgacctcggaggccccacatgaccggcctctgttaacctctccagtctcacttctctctatactcacttctgctctccctgcactagtcaaactggctgcctttttgtctcgtggatgtgccatacctccatcttacacaggatctttgcctgttctctctcctctgtctagaagtctttgctcctttcttaatctggttactcactcccacacacccttccaatcgcagctcaatgaacacttactccacaaattcttctctgaccctcttgactaggtaatctgaatgatatttgctcaaatcatgatttacctctatatttcttcattttccacagttgtaattttacatttatttctgtgtctacttgattaatgtggagagcaggagctatgtgtgggtcagctccctatgtagtacgaccagttcccagaagagtgcttggtaccttgtagaagctaatgaatatttgtgcaacattcatacagggcagagattattctggtgtcggggctcatgtgtagattccatagggagtaaatgtaatgcataaaatttatgccataagttaaagtcattgaaagttgcaacagtgttgatgtcagctttcgactgtgtaacaattaatagcacaagtctagtttgcatttgaacaggtatatgctgttcttctactggagaatcctgtgggaccatagactacccataaaactttgcttttgtggtttagaattgtaactgtaagacttatacatgtttgcagtcctggattgtgggagcaattgagccagcttgttcctctattagccatcaaaattttctgctcagtttagactagtaaatccttttgcaaagactgttgtccagtttttatctgaattttctaatagttctcaaccacagcaaaacttaaaaacaggacaacagacttttaagatagaataagaagaatatatatggtgttttcttacttttgtagtgtatgcgctatagttactgctaaatgatactacagaaaatgacatggttaataattatctaacatcatacataatcttaggattattctgggaataatgttaaatctagtgatgtcagttctgcataatgagaaactctgggtgtagatacagtttcaatcagttcatgacaattaattacttcaggaagcaagaacgacaaccntctatcacttatctttcaaatctcactgttaacctcaagccttcttatcttcatcagggctagggaacaaggacgcatagaataatttcatgaaaagatagactgtgcatttatataaatgcaactactgtattacaattaagcaatacacacactactgctttgtgtcaccagcaaagtaaataaaatactactctgcttcttacagtttggagatgagtcccctggaagaaaagccacagtttgtttttaagagatctaaactttaatgtccaattaatagtgaatgytattaataacatattaaaattccatatgaattaggccaaacaattcaacatgcagggcataaatacattaattcagagtaatttattataatgctctacttctccaaatgtggtacttatcttttttttgaggaaacatagatattgtatttattagacaaaggctttatgtcaaccatcgttagcatattaaaaaaactaaaaataaaaacatgaacaaaaagtaaagcaaatgaagagaacaatgtttccctaaacaaagtatgtcagtaaacaaataattcaaaaaataaacaaatagaaattctggagcagaaaagtacactaacttaaataaaaaaatttactagagtgatttaacagtacatttgagcaggcagaagaaagaagtggtgagcttgaaaatgggtattcaaaagagtataccaaaaagtcgtttaaaccccaaagaaggaagtaacggagaaattgagaagcaaaacttctagatttcctagaagtctcaggtcatcatccagttataaatagatcaaggcatcaagtggagcatggcctaaaattaaagctctatattatgcgttgcctggatgtctgaaatcaggaggaccttaaatgatctaactgcmagttcctcctctcagtggataagatcctctagccatcagtttttcctatctgggaatcatagtttttttgtttatccctatgttgaattttcctgccagaccacaattattgaagccagtcaatcacgtctgctgcaggaaccaggtcttatctccataaacgtggttcttatctgactttcatcaaagtaacctattgtgccagttcttgtctgacctctaaactcctctttcttctccccacctgccagacctaatgaatcaggatcttgatacgcaggacataaacatcagcattttaaacaaggctccagggtgattctgatacccaataaaatttgaaaaccacagaatgatttctagggactgagactgttgacaaakatttgtttctagttctaggttttcttctgccagggggcagtgttctctgaaatatggctgggctaataaaccatgttggaatttaatttttcagtctttcttatgcacttcttgtttactgagccagccacatgtgtccttattacaaaatcttaaacaccatagcaagtgaacttctcataatttagttttcttacaaaaggttttggactaattccagtcattttagttgaatttcttaacctactttatgcactgtgaagcttttttttgtttttttttttcagctttaggtaatgagggataattttattttgtagttaatttgatagccgaggtagggactttggtcatcttggtcattctcctgacagttaatttataacaataatcttgtagtaaaaatctgtttaactgtggcaaaatgatgtgtgtatgcacatatatgcttgtgtgtgtgcgtgtatgtgttcatgttaacatgttccttatgcacaacaagctggtaaaagacaaagttctttggcagaacggttaacagaaatagtggctgagggccaggcacggtggttcacacctgtaatcccagcactttgggaggctgagatgggcggatcacctgaggtcaggagttcgagaccatcctgaccaacatggtgaaaccctgtctgtattaaaaatacaaaaattagccaggcgtgttggcatgcacctgtaatcccagctactcgggaggctgagacaggaatcacttgaacccgggaggtggaggctgcagtgagccgagatcgagccattgcactccagcctgggcaacaagagtgaaactccatctcaaaataaacaaataaacaaacaaaaacaaaaaaacaaagaaatagtggctgaggtcaactcttttggatattgggtaacaagcagatcaacttggctattacagcttttccccctgcccagctagtctgcatataagagaaaaataaatggatgatgttcagctcctgaaccctaactttttttccaagggaaccctcattgtcttctagctaggtttatacaatcaaatatcagacaaagtcaaaagttgttagactctggcaaggcaaaagaagaggctgtttttgtttttagaacatttagagcactgtggcatataatgaaataacaggattgccttgatatttttctttggggtttattgttttcctctatcatgtctggcttgtatcttgaaatttaacataaattataggaaaatctttcatggagttaacatcttttataagccttgctaaataccctactccaaatttgttcagtatggcatacagacaaaagcaagaggcttacatataaaaatgtataagcctgtcctctttgcaacagtgcaaaactaaaaggattttagaaaggcaattaacagtttggcagtatgtgtattttctttttttcaattagatattactagattctaagaatctgtaatgaaacccaggcctactgtacaaccccctataaacaagtttttgcttttgtgctatcatgttttatttgagcagagccactactctgttactaatttgttgcatggtaagtctcgtatttgtttacgcacgaacacatgtgctgcggaagaaaagatggtcactggacctgctgaggaagaggccaaaaacaaatctttttccctcatttgaatcctgaaggcatgtaatatttaaacaactttcagatttagagcccttgattttttcttttgaaagtgtgctggttgccaaattgcttagtaaagaaactttagtacccacaatagcctcaaaggacacagtatttggtggctacatttaaccaagaaataactagggaaacaattcttgacatttcaattcttgctgccattgagatttccttcctaaattcaattgctaataaagcttcccatgccatccccttcccccacccatctgcctctcaaaaaccgccccctcctccgccccgcccgaaacaagctgacagtctttacgggaagaagaggcagagactgaagttattttgtccgtcctcccagggcagaaggactttatgctgcgtggctggcatttccagtattttgataaaagttacttctctaaacttgaaccacagcatggggaaaataatgttatcttttatgttagttacaattttgcgaaatttcatcatgagaaactttcaaggaggcagaagtagctgagaatgtgatactagggacagggtcgctcaaactgccagcaaaataaatagatgggaaagacaggaacgttattaggtttataaatgataaaactttccttgcttaaaaaaataaagtggtgaggttgacgccattgaatgactgcattgtaaaccttaaaagcttaaagctggtggaaagcccttgcacagccctgttttcatttttatcggatgaaatgcatttggtttctttttgacaaaccatgtttttgtgaggaaaggaaaatgaacatgcactgttatgggccacggcaatgtaacaaaccctcctgttgccagaggataccacatgaaagtgtctgtgggttaggggagggacctgtaagggggcggggataagggggatgatagcttaagcctcttaggctcagagctgcgatttgtgaacaccctgtgatgtaatcaagctctggacaaatcagaggagtctgtcaacctcccaggtgggattgcttatagttaatagactaaacccagagcctcaaagcagtgcactccgtgaaggcaaagagaacacgctgcaaaaggctttccaagaatcctcgacatggcaaggaggagctcgttccagtcgtgtcaggtgggagaacggaggaatgacgggggacatgcttgatcttcagaatcagtgactgattggcattttcctttttgttgtgcaaattaagatagcaccttattatgcattttggaagtggtaggattgggtgttgatattgaagccatttgaatcacctttgtgtaatttgatttagtcttctccagctgtatttgacaacttggtctctttattctcttagataatatccctgttcacttttgccgttggagtcaatatctgcttaggattcactgcacatcgaattaagagagcagaaggatgggaggaaggtcctcctacaggtaagtgtcaaaactatttgcattttcaattttttaaaaatattacatacggggtaatcaatgtaagcttattaaaatatttatttttaatacaatcttgcagtataactaagttagtcctaaatttctctgggtaaaaccacctatgtgtataattcaggtgggagagtgtggttttcattagagaacatttatgattgtttcataactggctatttccatttttgtactcaaatttgtaaatgttaggatacaattaaaactcttgttcacagacaaggctaaagtagaagtggtgagaacaggtgttggtttaatattggagcyacccaaatctgatttgctgtcacatgatataggatgtagtatttgccactagaaagttctgatgtaggaaaaaggaatggaagtaaaaaaggcagtgagctatctttatgaaacttcagaaatttaggactttaagatttacttaaaattggaaaaacataaaagagaggaggtgtttaaagagttttcaggattgatttgtcctcattgtgtgtccttatggcaaaggaaaggtaagttttaatagtgtaccttgacttaaataatagaaccaaagtgaaagagtttctttttacaatacactacaccataagtagtgttcccatacagtgttcttataaaggagctccttgtgcagacagagggggcttaactgaccaggtcttaagcaatgagttggttaatttcctggaaattggagctgctgatggttttagaaataaaaaattacattttaagtaatgggcactctagggaacaatattttctggacttttcctgacattccagcatgtttgtctgtcttcctgtgaattttgtgtttctctgtatgtcttgatctgattgttatgaaagaccatcacttgcctctgtttagccagcttgaaattttattatcaaccgggttaggacacatacattgatggaatactaaatcttccttacatcaattaagttacttttgaatcatgccagtaggttgaaagaataatattagaagtgaattagtgaattgaagtggggtgtggcggggttaagagtgagaaaatagatcacaaaacttgcagccccagggagccaaatggacaaaatgagtcgtcttctgttggggaggcagaggacagtggatcactgagctagagaatgctgtttttatttgcagcaaatgctctcttcaaaggcctctttttcactcccattaacactgactgtgactgaacagacaggggaatcagatccttagcatggtcatgtgggaaagctagcaacttgagagccaactgctggttcttttcaatgaacactaaagggaactttttttttctgtttcctcttaatatattactctggctaaaactgagattgaaagaattaaatgctgtttccttaatgaatgtaaaattgagtcactcattatttttaaaggtgacttcttttggaaaacagtcattaaaatcctaggctggtaccctggagtcctgtaacttgctgtgtggtgttgggcaagtcacttgtgaagtctgtttccttagctgtacaatgaggagcagacttagatgatttctacttttctttctggattaaaaaaaaaaaatcccaggaattattctgtttcattgcctcttgaatttctgtgctcactactggaaaacttgaaaagtatagattggatttattagtctttgaaaatattttgtgtatagtaaattatttccatgttataagaatagctatatgaactaatgaataaatgccacttctagaaaagtagtatggtctatattataatttataaacctaaatggtcttaagtgggctacacgaatttgctccttgaattatttaattaagtcgttggttattttaggcctttatgatatcatctaaaataatttattaaacttctaaccacgtgaagcttagtcttagaatacaatgcaacctaactctgaattttatggtttggatatgcctgaataatttttcttttgatgtagcttatgtgctttttaggaactgtggttgatttytcctgaataaaaatcaaggatgtacttagtaaactaggtaaaagcatcctgtagacagtggaaatatctttatgcgtttaaatgctgcatatgcttagaaaggatctctctcgattgacacatgtgactggttattctgaccattagaaaagccttcccatcagaaaatactgggtgaattttataagcctgtaagaataagacactaggtggggaggaggcagccatgcctatttccaacaacatttttaggcgccaaagaaatcctgggaagctcagtgctccaagggtgcaacaaatagaaggaacacaaagggtattgatatatggctagcttcggattgatcagagtgagatccaccattcaaaagcatgcagttgtttagtaaccatagcttctcagagtcctcaacaatagctgagaatgttctgtacacatggatgccctcgctgctgtactatggactggggtgttagtttcaaggttgtggcagtgcaaacagactgtcataattaattaactaacacacttgttacctggatttattgttagcgtaggaaataatggctgaacaggattttttataccaggtcataaaagatttatagatttattaggagatatgaaatgagaaaagctacttataattctgttgggtaaatacaatgggcattcaggttaatgagacggtgagatgggtggaataaattttctaagaaaatataagccataactgtgatttagtttgacatctttttctcatatgtctgatgtggcccacttgatttgcctttaagactgcaagagactttatatgtctacaggtgtctgtgcactcatgtgcacttgcagtgtgtatgtttgtggtgttatgcaggagtctattttattgaaacttgtgatttagaaactgtctccaggtggaaatagaatatcctctttgatatgtaagtaatttaattcttaaaagacaaaaggaaatttgtgagcttgtgaatagctggctaacagagacttaaaagctcagtttaattcatcattgtttttagtggcttgaaaggaaagttgaaaagtatgtgaatgaaattcataggttcatatgaaatgtagactgtcactaacaactttatggataaagcttttctttgagaatcatagggaaatcagaaaatggaactagaagtgagaaggtttatgttcatttgataattttagaaattttgctctgcaatgaaaagctatttaaatgttggcatgggagaatgcaggaaactgtaaaggggacgtagatcagccatttgctctgtgagcaaaactcggtcattaggattatcctgtcatggggctttatgtgaaatttcaggtagaaattggggagtttgagtcaatggaatgaaattatctgaactggaagctaaggagggtacagatttttcagttctttgttaaatggggctgtagtgtagtgatttttcatctatctgaaaactgtagagactcctctatctagtttacatactcagaaatctcagtcttccatgaacttcagcctagatttttgaatcaataaaatcagcaaatcttccccaaaattatattttgaaaagaacttctaaaatttgaaaactatgtacaaaagtttgaaaaacctttcattaatgaaaaaaatactgtagttacagtgagatgatctaaaattttatccaggccttggctaactcatacaaggcctagagatctaattttccaaccaggaaaatggggataaagtcgcttttatttatctgaaaaagtttttgaaaatgcctttaaggctgatgagaactataaggtgttaagtatatgataattcatttaattaatcttcaattaggtttgaaggccartgtttaaacttataccttattgagttaacaatacctttaattttaaatgacaacattttattgtttggtagcagatgtgcaaatcattcagatttatgctactgatggccattaaattctatttaagtggtttagatgttgaagtaaagtttttaacttttaacttcaattacgtagaaatctttttttttccttctagtttgtgagctctatatgaggacattgkgtgtatgtatgtatgtatgtatgtatgtatgtatgtatgdatttattttttgagagagagtctcattctgtcacccagactggagtgcagtggcgtgatctcagctaactgcaacctccacctcccaggttcaagtgattctcctgcctcagcctcccgagtagctgagattacaggcgcccaccaccgcgccaggctaatttttgtatttttagtagagatgaggtttcaccatgttagccaggctgctctcgaactcctgacctcaggtgatccaytcgcctcagcctcccaaattgctaggattacaggcatgagtcaccgaggcaggtcagaccattgtgtttataaatgttttgaaagcacaggtgtttaaaaacttcccaggtggacctctttattaaaaaaaaaaaagtttatgaaatctggcctagcagctgtgaagaggagagaacagtgatgttgcagtaatggatatttataaaaagttatgtatttaggaagcaaagatactgacatgtagacctgtgtgtaagttctatttactaaaaaatgaggtcagaagcatcaataaaaaatggcaaattcaatacgaaaaaagtatgaccagaaagaacgaaccatatactccagaagaggcataatacagtattaactctagagctgggcagcatcttgaatgccacgcacactgtcctctgccttgccctgtgggttatgcttcaaacagggcagcagacataagggaacttgtcctgttttaacgctcttgagaaaaggagctggtataaccacagctggtaacacattttaaggttttgctctcactttcaggaaayacctgggctaagaaccaaggagaatgggaggaacagatagagagcagtatcataaacaggagcagacaaagcttagaagaaccttccccctttaggctaagctaaatgtttccaaacttaaatactgcctcttctattggccatcatccagatttgagtatttgcatctttacgggggacatttagagggaaatatgattgggagccttagatcaagtaatgttttggccatarcttttgtcatcggttaggctccttccaaaaatttaaatcatcaatagttttgttgtatcttatggaacagatggcactagaattcttttgttgttgttgttttttgagatggagtttcgctcttgttgcccaggctggagtgcaatggcatgatctcggctcactgcaacctccacctcaagcaattctcttgcctcagccctagctgagattacaggtgtgcacccccatgcctggctaattttgtatttttagtaaagatgggttttctccatgtttgtcaggctggtcttgaactcccaacctcaggtgatcggcccaccttggcctcccaaagtcttgggattacaggcgtgagccaccgtgcccggccggcactagaattctacaaccctacctctctatacatattgtaagatggaatattttagacataaagttgacttaagtaaaagtaattgtacctgtttctgtcagaattatgaatttgaatgaaataacgtatgttttacattggtgtttctttaaatcatgaaattatgcttctgtgaaaaataagaaatgcattgcattgttgttatacatgtcatatatgtacctatgtgtattttaaaatttgaggtttctattttttaaaagaacactatataaagctatgaacatttgtttttcaagattctggaactgacttgcatctttgaagtaaaataacatcatttgaatatgtattttaaaaggcggcaatagaatttgaatctcataaaggtattagcaaatgcctcataagaaatttcaagcctccatcatacttatcacatatttctgccttgatacatttggagagtactttttgtttgttttagttgttttctgcgctgttacggccatctcagtaatgatgaaaaatttgggataccacaagtttgttgatgtttcagttttcatcccgcctctcaataagttacacatctgaagtgcttacatcaatgttctcttgatttaggtcaagtaaaggaagacaacagattttaaaactcagacttctaacaaatcggataatctttccctatttgacattacgtcaggtacaataaagagagaagtcctaaaaacttcaaatgcatgcaggaacaaaggactgagggatgagcagaatgttcagataaatggcttgggcgagcctggaaatgacatttaacatcgttctccttctgcttcttgatttttcttgattttaaacatcttaggctgggtgtagggagaaggacagggaacgtgaagactccaagtatactgacttgatttttatcaactacatgaatgtattatcaccccaaaactatgtacctctattattcatccataaaaaatgattaaaaaaagaatatgaaggtggattgcagaactcctaggaaaacagttgggactagagcttgtcgtgaaagaagatggctgggacggaatagaccctggaaaggcagagtgaatattccactctattgttctattttatttatttgttaatttaatcattttgtttattttttttgtacactcatcaagatggtcttttccattgcacacaggagtgtgtggcattactgagtgtcatcatacactcactgtattttatttaaaagagatagactgggcgtggtggctcacgcctgtaatcccagcactttggaaggccaaggtgggcggatcacaatgtcaggagatcgagaccatcctggctaacacggtgaaacccggtctgtactaaaaatacaaaaaattagccgggcatggtggtgggcacctgtagtcccagctactcaggaggctgaggcaggagaatggtgtgaacccagaagacagagcttgtagtgagccaagattgcgccactgcactccagcctgggtgacagagcaagactccgtctcaaaaaaaaaaaaaaaaaaaaaaaaaaaaaagatagcagcatggctgggcgcagtggctcacacctgtaatcccagcactttgggaggccaaggcaggcggatcacgaggtcaggagttcaagaccagcctgaccaacatggtgaaaccccgtctctaccaaaaatacaaaaaattagccgggcatagtggcgggtgcctgttattccagctactcgggaggctgaggcaggagaatcacttgaacccaggaggcgggggttgcagtgagccgagatcgcaccattacactccrgcctgggtgacaagagcaaaactccgtctcagaaaagaaaaaaaagaaaaaaaaaaagagatagcagctcaaatttatttgggttattggtttataagaggttctatatggctcaaactaccttccctttttctttcctgtcattctcagctgaattcaaatcatccgagaatgaattttgacataggtatatcctaatccacccagccccaggagtataccctaatttgaagctgtcaataacttgatcttaagtacagtacttcttttgagatacatcttggcattatgagtgtaaggctaactctaacaaagttgtctttagttttgcttgtctttaggtttggcaagaactgtaactgatagggaccgactattaagtgagattcaattattttccaaaaacaaagcaaaggacaaatttagagaatgattaatgttgtaagaaaatagtaaaaatcaggtgaatgagtgaagaaagattaaatgtggctaaaaattcacacagatactctgaaagtaaagaaagaaataggccggatgtggtggcttaagcctgtaaccccagcactttggaaggccaaagtaggtggatcacctgaggtcaggagttaaagaccagcctgaccaacatggtgaaaccctgtctctactaaaaatacgaaaattgctggacatggtggtgggtgcctctaatcccagctactcaggaggctgaggcaggagaaccctttgaacccgggaggcagaggttgcagtgagccgagatcacaccattgcactccagcctgggcaacaagagcaaaactccgtctcaaaaaaaaaaaagaaagaaatagggaagaaatgatgatgaaggaaagcaaggcgcgtggttgcaggacaatttcaaatgcatgcaggaacaccgcacatctgtaaacaaattgcctttagatctctttgaagtatctcagctatcagcatagctaagcttatttatttaagcagctcgtgggaatgaattctactgaaaatttactagaacgctgttgaaatgagtctatctaagcagtatccttaaggaatattcaattgtaagtactttccttatatttatttttactgtaggactttctctatttttttctgttttgtaattttttttttgttttacttctcaacccctcctgcctccatggtttcttatggttcagcatgcactgttgataggttggtcaaagacaatagaaaaatgtgctttatggaccactgcattggaaatgaatattattttctaaactgaactcgtacggtttgtatgtctttcaaaatcctaggagcaaccatgcaaaagtgtttcacatctcatgatctggtaaatctgtttgctttagttgaactgatctgatgccataaaggctgggattggatgactctgactttaagactttaacgaggacaaaggactaagggatgagcagaatgttcagataaatggcttgggtgaacctagaagtgacatttaacatctgttcttctcctgcttcttgctttttcttgattttaaaagtaaaacatgaattataaaaaatgaaaaattcataagcatgtaaataagaaaataaaattataaatcgcatgtcaataatatttgttaggatatttacatatatggtatattttatacatatatacacatacccacacacacatatattatatggtatatattttgtacatatatatacatacccacacacacatctattatacggtatatattttgtacatatacacatacccacacatacatatatgacatatattttgtgcatatgtatacatacccacacagacatatattatacagtatatattttgtacataaatatacatacccacacgcacatatattgtatggtatttatatataatgagagagaaggaaagagaaagtaagtaagcaaacaaaaagaccaggcaactacctgtgaatttgtagaatgttagaaatttcaaacatcaggaaggtaaaaatcttcttcctctttctttctcattttccctaaatgtaattccataacctgtttcttacagaaggaaaaagtttgttcacacctgcattttaaaaaygtgatgcaaacttggacattttctccctccttctgccctaccctgtctctcactcgtctctagttttggctctgtttttatttctatcttcatttctatccttattgccctgtttatctctatttttaaacacaaagtctaatatataacactctatcctgtatttattctttaaacaacttatttatatattttgtagatctttccatattagcctacaccgatctgactcattctttttaaggagtgtgcaatagtcctcttacggtgcaatagtccacttatggatatagcgattctttctttcttgacgggaaaaacaactttggttgatttcaggatctctttacctgtaataaaaggactgcaatgaacaatggacattttttgtacatgtagcttggcaaacttttgcaaatatgtgtaaatggtaaatttctagtaatagaatttctgggtgaaacatttataagcatttaaacatgttgataggtctttctaaattatattctactttacaaaaattttaattcctggaaacagttatgaggctgtttatattttccatttagcagaaattattttgtatattgagatgagaccctaacttaattatttatagtccctacttactgattggctcccatccacaacattaatctacttattttctagtatcagactactttgattatttaacttcagaatatactttgctatctagtctttatcaaattacttttccttttcagaggttttctattttaaaatattttatttttaaataagtgtttaaaattttttcaagtttcatgaactctcagtatttttggctgtgattgcactgagtcttctggtttgtttaggaagaattaatatttttataatattgatatttttacctttaaggtggtatgtctttcattttaattagatcatatatatatatatatatatatttttaagacggagtttcactctgttacccaggctggagtgcaatagtgcgatctctgctcactgcaacctctgcctcccaggttcgggcaattctcctgcctcagcctcccgagtagctgatattacaggcacctgccaccacgctgggctaatttttgtatttttagtagagactgggttttactgtgttggccaggctggtctcgaactcctgacctcagatgatccaccgacctcggcctcccaaagtgctgggattacaggtatgaggcaccttgcccccaccttaattagatcttaaaaattttttttttggtagacttttctcatgtatgttggttctacatacatatgattaaatttataccaaataaaatacctagctattttatcatttaggccctattgagaatgaaacttctgtttaattttgaaactatattgtgtgcatattacaaatttgtggaattttgatctcactgaattctttttttccccaaattttagttgattcttttgatttctgatatacacytatatcatgtgaaaatattgatggaggagttttttgagaagcccagattatagagcttgtatttgtaaaacactagctgaaactgtaaaagtcttctattccaatctcatatattcgttctgttcttggaacatttgagctgaattttccttgtaaaaagttttggatttttaaatagggacatgctctcttgtttctaaggatatagatcaaggtactgttctctgtggtcatcgttagcacccacaggggcactaatcatcacagatttgcagtaataataattataaatagtaattgaacaaatcaccaacacttgttactctttctatatgtctgacatgcggctaagtgttttacatggattgattcatttaattctcttttcaacatagagttacttttatgagtcccccactttacagatgaggaaatcgtagaacaaggaagttgggcaacctgcccagagtacatgggtagtaagtaatggagccagtgttctcctccagagtccactgcagcatcacaccgcacagcttcccagtgccacctttccatggtgacatgaccactctccagtccattgtttttgcctcttgttctttgcagtgctatcagactccccctggaccaacatctccggatcttgcaagggcaggtgctttgaacttcaagaggctggacctcctgattgtcgctgtgacaacttgtgtaagagctataccagttgctgccatgactttgatgagctgtgtttgaagacaggtacgtaacttatgagtcctctctaccttcaagtagatggcttaaagactgcctgctattgtatgcatcctggagtggccaccctgctttggtctatccaaactgtggattctagttttgtttgttgaatgattattggttctttgaagagcataccctatgtcaatgaccattgtttccacataggttccagcagagaaaggttctttgcagctgcagtcatgatgtgctggttttgcaannnnnnnnnnnnnnnnnnnnnnnnnnnnnnnnnnnnnnnnnnnnnnnnnnnnnnnnnnnnnnnnnntcttcaccttcatcctttctatatctttctgtcaattcccacattcactgctagggcttgtgggctaaaattgtgtatgttcttttttattacttatttatttttaagagatagcatctcactgtgttggtcaggttggtcttgaactcctggcttcaagccatcttcccgcctcagcctcccaaagtgctaggattataggagtgagccactgtgcctggcctaattgtgtacattctttaaaaaaattttttttcttgctttcccagcttctagcatttgtttcacttcatcttatcgtacagtaactgttagtgtgcctgtcattccctgccgtctgcaaayggaaaattgttatggaattctgtttggagtctcacgctctgggtagctctaaaatcttcctccacactttttgtgactttctttacatttcttttgtgctggaacagttactaggatgtacaggcttctgtatgaatgcacatgagttgagaaaaacacctctggggacttctgccatcccacctactctgttttcaaagcacaatatttcagataggatttttgagatatcttgtaagctatccaccatgcttctggacaacaccatacacaaactatctgagaaagacaaccgtcaatgctgttcttgacatcaccagaagcagtttccatggtttccttggcaggttatttcttgtttttggacttttatgcttagacaattctttcaaagacctaactcttactatcattgctattagtttgatctttcaaattttatcattagaaacagttattactgtgttttgcctaagtggtagctcttgatttatatgaaatccaacataaacttccttactagttctgatttgttttcctcctgcgtccctgcaataagaacagcttcattaggctgttttttgcagaacacattttccaaccatttaaccacttttttgggggttgctttcctttggaacttctcccagtttcttttaattgtggatctgcaaactaaattgctgagactattgtaaactgaatgtatagatggaacagatgttccagcagagtttttttggctctaaaacattatttcaagccagcaatctgtgtttgcttggcactgaggaatttactaatgttttatgtttcctccttaccttgaatatcttgtctgtggcatgtcatatcaaacttctggattcctggtcttagaattctttgcaaaatgtaatgaatccctgactctagcttagctctcttttgaatgtagttcatgcctttgttcctcaatttattaaggatgggatataatatcttatagtccatttccctgtgtacaaagataacatatcctgaatgtgaaggaatcaaatatcaaataataataaaaggatgaatagaaaaacaaaaggctctgagattctcctttgttgagggagcactgccgagaaacaaccacaatgtttcagcgaaactttgataactctgtgtgtgtgtgttttcagtatgtatctatgtgtgcatgtatactcttccaactgtgtgtatatatatgcatgtgtgcgaaagtatctgtattaataaatctttatacaaatcgtccttttgaatggctatgtaatattccattgaactgttgcaacctaattcattgagtaattaaatgaatatttcccygagttttactattatgaatgatgtatcaatgaatataattgatgcatattcatacttttgcctattctccttaagataaatttttggaagtgggattttggggtcaaagtatatgtgcattttttttaaatttaaatatacattactaaattatacttctgaaagtttatgtttctactaaaggacacaaggacctttcatcacttccttttcagcattgaatactcttatttttaaaaatatttttaaaataatctggtaggtgacctcctccttattttccaataaggttaaatattttttatgtttattcccatgtttgctttgaaaattacacagatgactgacttgtcctttgtgtatagttcactttaaactctggatttattttatatttcatttgtacataaagacaatagttcctcaataaacatagcttattaataatgatattcttttgtaagtaatgtagatgtgattttcttatggaattaggagtggaataaaagtttattggtggatagaatcaccttgaattgaaaaaaccccacaatatctagagtcaaagcaaccttagaagattgctcatcattgggaagagcaggtcatgggaaaagcaattctaagcacttaatctcctcgagaagagataggaatggaaacgggatattaaaaaattagaatggctgggcatagtggctcatgcctgtaatctcagcactttgggaggctgagggaggcagatcacttgaagtcaggagttcgagaccagcctggccagcatgatgaaatcccatctctactaaaaatacaaaaattacccaggcatggggggaggcacctgtaatcccagtttcttgggaagctgagtcaggagaatcacttgaacctgaaaggtagaggttgcagtgagctgagattatgccactgcactctagcccaggcgacagagtgagactctgtctcaaaaaaacaaaacaaaacaacaaaaaatatcagacagcagaatcaggatgcaaaggtaattctaaaagaataaaaattaaatagtaattgcatggttttctggctaatgatttaccaaaaggggcaggggtagcagttatgccaaacaactaatatctctctctcttttttaatctttttagatggagtctcctcctgtcacccatgctggagtgcaatggcatgatcttggctcactgcaacctctgcctcctgggttcaagcgattctcctgcctcagcctcctgagtagctgggattacaggcatgcaccaccatgcccggctaattttttgtatctttagtagagacggggtttcaccatgttggccaggctggtctcgaactcctgacctcacgatccacctgcctcggcctcccaaagtgctgggattacagacatgagccactgagcctggcccgtaatatctctttattaatgtattcacctaacaatagttgtttctcttggtagaatattactaagaggcaggattgctttaaaaatcatttctttccacttatcacatattttaagagataaagacctgaagtgttcatatgtattttagctcagtgacacctttcttgaccattctacttcctggagtagcacctatttcaccctatctttctctatcaatgccacctgttacttccttcacaacatttggcataagctgaaatgatcttgcttattgatttacttgcctatgatctgtcttttccaattggaatgtaagctccatgaagacagacctagtctctcctgttctttatgacatcctggcaccgagaacacggaaaacatggtataagagtcaatgagtaaatgagttaactatgaaagttctcaatagagtagttctgaatttaaagagttatattttatctccatggtcatttccaattcaatttaatacatattgattgaacacctagcatgtgccaggcgcagtctcccaggcttacagtctgccactggaaatagaagagcgaagagagaggtgtcacttttcctgccatggcgcttacactctagcagatgaaaaagtcaaaaaacacagcactccttttaaaatggaaaggttgtttttctgaaatgtaagaattaagcagtgagctgtcaatcaggtatgttcagagggaaatctgtaacccatttacttggcttgaaagtaggaactctracctgtcattgtaggtaggaccacaatgggtcagtggttagaatcttgagcaaacattgtaatgccccctttatactcttcacatcctatttaggactttaacctccaggtgcagatagaaaccatgtagttgtcctgttatttgtgtttgaatcacactgattaacgctaagcacagctactttaggctaggtgctgtggctcatgcctgtaatcccagcacattgggaggccaaggtgggaggatcacctgaggtcaggagtttgagaccagcctggccaccatggtgaaaccccgtctctactaaaaatacaaaaattagccagacgtgatggcatatgtttgtaatcccagctactcaggaggctgaggcgggataatcgcttgaaccagggaggcggaggttacagtgagccgagattgcgccacagcactccagagtgggcaagagagcaagactctgtcaaaaataaataaataaataaaataaaaataaagctaagcacacccacttcagaaattaaaagagccaagctatagaggctgtccctacaacagtagatagccctatcataaacctttgatgtcataaatttgttgggtcctttaggacaattcgagaatcgtagggatacttgcttgcctttcagggccccatttttccaaaggaacccaattgcattttgatgttgttctctgatttgaaaacttagaaattcatcttatctgtaaattctccaaatgtcctctgggcctcaagccaactcaaatttcacaagcagagtaaatgatgtgagattttagctttcttcattggaaatcctgtaagcaattgtggcttctttcatttggttagtgtgcagcagtgaaaatgttttattgggatgattttagcccgtggctgggagtgtactaaggacagatgtggagaagtcagaaatgaagaaaatgcctgtcactgctcagaggactgcttggccaggggagactgctgtaccaattaccaagtggtttgcaaaggtacgtgtttctttggattggcctgagctttaaaagaataaaaactggaggtgctccaggagatcctggatgctaggaatagaccacactggatatgagtttgggaggaaggaatgaattgtcctttttaatttctcatgcttcttcattagttttgstactctgtatttcactgatctgaagtaacaagggaagaaaccagaatttcttaattagacagaarcataataatgaagagatttctaaatttcctatcttggttttaggtcaagttttctagaagcagatcctgagacaggaattcggtacatgcagtttattgaggaaayggatatactgcaggaaaaccatgtcggaggaaagggaagyaggatagggaaggaggagtgtggagagacaagtgaggacatgctctcagttagcctcgcctccctctattgcttgctctgaaaagtaaatccaggtcactactcttgaggcaaggaaccagggcttttttatctattggatgtacactgttcaccaaggcattggcaactgcccagggatgggggtacttgctggtaaaggggatgagggggccagcatttcctgttataccccaaagccatatatgcatgagtgttggctttgtctggttgattgtagaatatgatgcttttattccaacaattaacaatagttaatggactacagaaaatataaaagatgcagttattctctttaatgggtttaagttgccgtgcaacccacttatagaagttgatgggaagatccaagaatctttatctattgtttgtaagtcactttttaaatttcaaaatcaagtccttttcattatctctgatgtggaacatttaagaagaagttcattaaaagatttcaggaaaaaaatcaagttacttctgcaatatgtaaggtgtttagttgtggcaagagggtgttatattaatatatttgaagaatttccccatacccaaacaattattgtattgttaatttcccctacccaataattatgcttttattttgaagcataaaattggttgagaatttatttccctttcctttttaatttgcctgtgcagtaagtgtaccaggaagccacaaaggctgttagaaataaaattttttttaaaaaaagaagcccttggaatcattgatcattgaatcattaagcattggcttttactggtttaaaattctagtttcagtacttttgtgaggcccacgtgtgtgctctgggttactatatgtgtagcaaatcttctttattttaaggagcataatagttaccccattgtccagtagttagagtcttattgaccagagaagatttccagttctctttacatgggagcaatttctccaatgtgttggttacaaattttacttctgttcaggatatgtaacttttgtttgtcttaaaataatttaaggcaaattctttttgataacttgtattttcttcaaagcaaagcttatgtttttatctgaggccttttctgttctctattctcgacattatgctcttagatcttggtggaagataaaaagtgaaatttagcatttttttctttctaaattcaagggctgtatggagatttattggcaaataatctttctattgtaatcttccacttattatctctgtagattctaagacttttttttttttttttagcatctaaagggaagttttgccatgctttctatggctttgagatctccagtggtggagaaaagaatgttccatctaatgaccaaacagtttatttctggagggatacaaacatgaaattttgttcactgacgccactggtttttttaatctacaaaccatttagactcggaaggctcaaataaacacctcaccacttgtggttattaaatcttagctttcccatcatgtatgggtgtactttataagccaaaccagacactagatttttttttcagaattttttttttttttgttatatcccataaagaaagtatcaaacaggacacagatmctggaattgtgagcttcaaggcatggcatttgtaattagattcaacaatacatttacccatttttccttataggagagtcgcattgggttgatgatgactgtgaggaaataaaggccgcagaatgccctgcagggtaagtgtattttatgactattttgaagttttatgtattagctgataaactctcacaggaaatgaaaagagaagtatttagaaacaatgtggaactgaaattctcttatacaggcaaacttatgagtacttaggagtaattcatgagtcgaaaggttgaaggtaggtcttgaaatggtgatagttttcttccccccagttttcyccaatcacctctgcacatattggggtctgaacatcccctatattccacctcagctgaggattttacaaagtgcatctgaatattctggctaagactttttttcagtattgtttttcctggagttcttgttttgcctactttgcggggagtggggaatgaaagaggaagtcctgagaacctttaaaactgtgttatccaataagtaattattacttattgattacacacctgtaatcccagcacttgggaggctgaggcgggcatatcatttgaggtcaggagtttgagaccagcctggccaacatggtgacaccccgcctctactaaaaaaaaaatacaaaaaaaattagccagcgcttgtaatcccagctacttgggaggcagaggcatgagaatcgcttgaacccaggaggcagaggttgcattgagcccagattgtgccactggactccagcctggatgaaagagaccccctctaaaaaaaaaaaaggcatccaaggcagtgggacatctggcttctgaatgggaacctttatagcaccagcaaccaaagagagaattaaatatgggtgatgttgaaaaaggcaagagaatttttgttcagaagtgtgcccagttccacactgttgaaaagggaggcaaacaggtggctgggtcaaatctccatggtctctttgtggggaagacagatcaggccattggattctcttatacagaggcccataagaacaaaagcatctcctggggagaggatacactcatggagtatttggagaatcccaagaagcacatccccggaacaaaaatgatcttcgcaggcatgaagaacaaggcagaaagggcagccttgatagctcatctcaaaaaaagctaccaatgaataataacaggtcactgtgttatttgttacaaaacagaaatgtttcatgacttcttaatctgtaccttaacagatctcatacacaagaattcagataatgaatgactgacagagtatttttgttgggcagtcttgatttaaccatgactggcttgtggttaaatggttaaatgaatatgttcggttattttattttattatattttttttgagatggagtttcactcttgtcgcccaggctggagtgcaatggtgcgatctcagctcactgcaacatctgtctcccctgttcaagtgattctcctgcctcagcattccaagtagctgggattacaggtgcccgccaccacgtgcagctgatttttgtatttgtagtagagatgggggtttcaccatgttgccaggctggtctcgaactcctgacctcaggtgatcagcccgcctcggactcccaaagtgctgggattataagcgtaagccatcacgcccggtgaaattttttcttggaaattattgctcccattattgagaatcactaggcgtaatggcaactctggtaataatgtttctaaaagcttaatgtgttactgtttaaggtttgttcgccctccattaatcatcttctccgtggatggcttccgtgcatcatacatgaagaaaggcagcaaagtcatgcctaatattgaaaaactaagtaagtaatttccatactctgtgttcttatctgtaatctaggatctccacastaaccagtgggctgtgggctttgagatctatgggcacgtagttttaaatgtgttttattatttgaaatacagaagtgaaggtaacacatgtctgagtgtttataaaatggattttctataagcaattcctgttggttctcttgttctaatatttgcaattctctttccagggtcttgtggcacacactctccctacatgaggccggtgtacccaactaaaacctttcctaacttatacactttggccactgtaagtattttttcgaatgatacacattcaaagggctgatttcatcctggaatgactttaaargagagactttacttttaaaacgtgttccttagtgttcaaagaaaatctttctgttttccatcttaactgggtcatttgttcacagcaaatgccttttacaactttgtgggtgatggaacttcattccaactttaaagctgaaaacttttttcaggtgcagttctgtttgaacacatacattaaacttctctcaaataccagagggtctattgtttattttctgaatttgcaaataaaaatgttgacttcagggctatattttaattttcaggtacttcaaattctaccactcttccttctttaaaacataatttatttatatatttttattgattcggggagcaatagaatttagaaagaaagaaaagtgtatttagaaatagaagcttctttggaggcacatgtatacattccaaactaaaggttaatttattgtaatgaaaattattgtcatcttcttaaattacagcagaaaaaaaccccaatgttaaatttcttataatcatattaagtttctcagatggcttataatttgtcccatagatattattcatgtttgctcaaacagatacacagtgaaggttatacatgtcttatataattttggaaattaagtattgctataaaaccttctatgctaagaaaattcatactagaactaatgtatgtggattattgtattgttattttaacaataaatttgcttttacaaaaaggggctatatccagaatcacatggaattgttggcaattcaatgtatgatcctgtatttgatgccacttttcatctgcgagggcgagagaaatttaatcatagatggtggggaggtcaaccggtaagttttgcatttattgtgtgtctatgtgtttgtgtgttcatgtattgagacatttcatccccaaatttgttagatgtggaaaaaatgcgtataatttcctcatacttggcaatgtttctgtcttttgatacttttaatatacatacaaacatgaaatatgtgtatatatgcattatatatatatctgaaatatgtgtatatatgcattatatatctgatatatgtatatattatatatttatgtatgtgtacatacatatgtgcacatagaatatacatgtatgtatacatatgtgtatgtgtctctgtgtgtatatatgcatgcatctttgtgaggctatgattataaaagtgagatgatatgaatgtcttccctaggattatggtggtgacaatggtgatgaggtgaatttcagaaccattttgacaaagaaatagtcagatctcattgatttcccagatttaggcgtataataaaaaagagaagtgtatgactgtgacttccccaatatgctagccctgatgctataataacagaaacagggaaacttgctggaaaaaaagggaactcactgaaatccacagtaaattcatgaatttttttatttaatctattttttaaaaatcatgaagttaaatacaaaaagcagaatcctaccttgatactgaaatagcaaattaatactttgaaaagaaatcaccctgtttacttcagatcaaatgactgggcagaaaataaaaagggttgtaggtggctttctacctaatgtttttcctgtgaccgtgtgtatggttacgcaacttgctttggtcagacatgagcaaagcagcataaagccacagttgttgaatgtgcagagctgggctgaagtgtacaagcttctggccagaagtatcagaatcacctaggaacataacccagggcacacaggcaatcagaaacatgtagaagtaagatggtaagtggttccatctcatgccaattctgattggagacagtggcttcctgcagcactggttagagaagagggctgggagaactttgtgcactcaaccgtggcatgactggtgggcagtgtctgcacacatccatgtatccaccatgcctcaatgatcttgtacctggaaatcttttgctgcaatttatggacaaaataaggactataaatagaaattttttcttaaggtatctcactttaagaaaaggtcatttgtgatcaaaatatttatattgcataataggtaaatcagtatgcaaggataaatatgagctttttattaaaaaaataaacattgaaagacttcttgtacatctgcagataagtttctttataatagatgctctgattctgctgtctttattcaggctggactcccagaagtccataatggcctagggtgtgatcatagtgaaatttgttgacagggtggattwttcaaagtttatgataggggaatattttatgagtacacaaaatgattgaaattagagctccattaagctttcactagtgggtcttttatattaatttgattatggaagcaaacttacctgaagaaccttaaaggattagagataaatagtaattttatcaaattggatcaccttacaccaagtgttgacataaggtttgctttgggttaggatgactcagaagaagatgaggccacatattcattaacttctgcaaaagcagagcagaggaaatgctgttaacctgcccaatgaagtgaagtctctgtttcagctctgtttacctgtttcctcactaactcccaaagttgacgcatctgaccaagtttagtactctcctcatgctgaccaagatttgtggtgaaactgactagtgtttctgtcatcttgggcaagatggccaccataagaattcctaggaggggccgggcgtggtggctcatgtgcgatggctcagcactttgggaggctgaggtgggtggatcatgaggtcaggagtttgagaccagcctggccaacatagtgaaactccatctctactaaagatacaaaaaattagccaggtgtggtggcaggcacctgtaatcctagctactcgggaggctgaggcaggaaaattgcttgaagctggaggtggaggttgcagtgagttgagatcacaccattgcactccagcccgggtgacagtgcgagactccatctcaaaaaaaaaaaaaaaaaaaaaagatttcccaggagcatagtaactacaatttaaaaacacattttattgaaatttggcatattggaaaaacatatagacaaagtattgttctattctattatacagtagggtgttctattatacagtagggtgactatagcaaataacaatgtagtgtatttaagatggaaaattttaaatgttgtcaccaaaaagaaatgataaatgtttaaagttatggatatggtaattaccctgatttgatcattatacaatgtacacatgcattgaaacatcacactgtatcccataaatatgcacaattattatatgtcagttataaataaaaagtaattaaaaagaaactttagtcaaagtataagagtataagcaactaaaagtactataagaaaaaattaatgaatattctacaagcatttataccatcctctcagaggcttcgttttaaaatcaccagtgaaaaaatatttataaaagtcttataattttttatacatttataagagaaaatatttatacaaatcttagattgataattaaattaaactcaatttatttttactgagggactaaaccatgcaagacatttagccaaatggcataggggtcagattacatggtgaataaaagccacttcttgtcctagcataaactctagtagatgggatgaggcaattgtacaatggccatttgaaaatttgaatctaaataggcgtcttccgaaaataatttaatttagtcttttataatttaatttaatctttgttttttagccttgatatagtcaattaaagtctagtctgcttttaatttgttaatactcaacatgcattgctagaagcagtcgtttgctgtaggaccctgcatttctcatacgtagtttaatggagttccttaagtgggttggtttctttggaaattctctctgctacggtcctgcaatttctaatacaaagatacttccatggggttgttccctgttctgtttaaatctggattctcagcaatgggaggaatgaatgggattcctaggagttgactaaatgtggagatttgagaaacaagtctaataccccatcatgatccaagtctcctgaagtcagcatttctggagtaaggtgtttctaagagaagcagattattattttttaaaaatttattattatatttaatgagacaacatcttagtatagtcgcccaggctggagtgcagtggcatgattttggctcactgcagtctcagcctctcgggctcaagcaacactcccacctcagcctcctgagcaggtgggactataggcacacactaccatgcctggctaatttttgtatcttttgtagagacaacatttcgccttgttgcccaggattgtctccaacttctgagctcaagcaaggtgcctgcctcagcctctcaaagtcttggtattacaggcgtgatcccaactgcaactgtccagcagatgcattcttatcacttaagttgcttgacctagaattgctctctgccagtattggtggtacaatgagttggaacagaagccattttagtgaatgactgcagtgaaaaaatgcaagaaatgtgtgtttaagacagagacagcaggagaagaagaatgacacagaataggggtgactttccaggccaaaaggggttgacttgatggaaagtacaagtcattgctaacctctttttatctgttttattgtcctgataaagagacaatatttcttttcaggaacatttaacctattctttattctgttgtttcttttccatatactaccgcagacctgcagttttttctctttgtactgtatccaaatgtacctagttagggcgagctctgctaacctggtgcctttgcttaccagcctcttatttttcttccaaatttcagctgaagtgtctgtcccgaggaggccttccttcccccagcatttccagctctggctaagcaaagtgactgtcctttgggcttttatatttttactatcataaatttggaaatctctttttatttttattttttttgagacagagttttgctctgtcgcccaggctggagggcagtggcacagtctcggctcacagcaacctccgcctcccgggttcaagtgattctcatacctctacctcctgggtagctgrgattacaggcgtgtgccaccatgcccagataaaatttttttgtatttttagtagagtggygtttcactatgtcaaccagtctggtcttgaactcctgacctcaagtgatctgtctgccttggcctcccaaagtgctgggattacaggtgtgagccayggcgcccggcctgaccacctccttttgaagttggttattcacaggtctgctttacactgcgggtcccatgcaggtagggacttggtgtatttctgtttcgaagacccaatctagagcctggctccgctattgtgtttcggatggaactgttctttgtttccttcgggggcatatttggcctgtgcttcccctagggtaggtggccttaaggacagcactccatctcagcctcggcagctccggccacatgccaacagcttcctcactcacctccttctggccctaatcacgtggaaaccagctgcattgggccccagtctcttctgctgcctcccccaacccccacacccttaatttgttctgattctcagcgattgatctgctgaagcaagtgctccaccgatcccctggtctcctagaattctgtttatcctagctcaatgctttcgagtgcaaaggaatgatttcccttcgaggaactgctagaaagactgcactagtagtttatgttttttgaaaaaatgtttttggctaatatttttctttttccaaacttctccttttctcccaaagctacatgctgaatttgagaaagtgttgaatttcatatttaacctacttggttcctgtggaggaagcctttttgatttctaataaatagcacatcacaagatacaatgtcattcccatttgtccccttttcacaaagcagcatctaggacacaaatgttgaaagctgggcctccagataaaggaaagcaatgcagggagttttgggattagagggagaaagcccaaacccagtgttttcttaagcttatttttttagttgtatttttttttttttttttaaagacagaatctcactctgtcatccaggctggagggcagtggtgcaatctcagctcactacaacctgtacctcctgggtttaagcgattctcctgcctcagcctcctgagtagctgggattacaggtgcctatcacgactcctggctggttttttgtatctttagtagagatgggtttcaccatgttggccaggctggtctcgaactcctgacctcaggcgatccaccctcttcggcctcccaaagtgctgggattataggcgtgagccaccacacctggcctgatttttttttttaaactaccctctgaagaaatttatattgcattcaaattcagagaaactttgacacttatatctctgaattaacaaggaaccgggaagctyctctctctctctctctctctcttttataaccttatcggcttgtattcacttttcttcttctggaccaatattttagtgcctttttcccccccttgggaaaatgtgcttttcattttaagtattttatcttttttgttcagtttttatacttttctgatcatgctctcaattttctttttgaaaatgtggtcaacctgacttttaccaagaaacaggcagaatttttctgctttttgattttgtttttagaagaaatacaaattttacctttaaattgcctccatagtttacactgtatgcttctaagacactgctttttaaaattggttagttttttttttctgattacaagtaagttgattgtcactgtaaaattgttggaaagtacagaaaaatataaagaacaaatgatcttaattttgccatcataataattttaacataccctgtcattttcactctgtgtgctccttccttttgacactgtaaagacctcttccagtgatcttttttccctaaggattactgagttaaattaactctcagaacttcctgttgccctaatgatgccaacatcagcatgtattctaccgtatactttttgaaagtgcaggtcattatttgagaaatttgtattaaaagtgtgttttcctttaggaaactccatattaatcttaaatttcatagatgccaagtattgcctagtacaatcttcttggaaatagcaaggcagtacatctaggaagttgtttggatattggaatgtgctaagattgtgtataagcaattaaaataagtatgaaaatagatcccttaatataaggaactggcctctttgggaactggcatggttttatagtgtgtccagcacttcatttgagctcatcttcttgctggtggaggtgctggaacaagaatgaatgaaagtccaggacacattctgaaccctagttgggctggggttcctggaggatgccagaatttgtctttaaaatagaaagagctttggactaaatggagtgaaggactctcagaacaatctgagattcttatgtctccaaacatcccagggaaccaaaagtctggccaagaaggtctggtccctcagagccatgtgaacaggatgaggcccctacctctcccaggctgatgaaattcaccagcagctcagaacccacagactgaagagtgctctgtacgttctcctgccccatccctcatttgccagctacagtagctgttagtttggggctgaggatttctagaggctccaagggggctggaacccttttcgagctttcccagggcaggtatcccaggtgattttgaaacaatggttaagcttctggatgttctccacctcccagttacccatttcctcaaaaaataagttgtcactctttaaggatactctcaaaggctggtgacaatgaaaccagaaaaggggctggctacaattcccagatcatttttgttttggtcttaggcaaaccacaattctctctcgtatttgcttccattctctttctttaagtgagggggtttcttctcatagacttctgttcagtgggacacttgccatcttaggctgtttttaatattactagaataattggattatttatttccattattgcataacaataaatatgtaaatttatcgagtgtttgccagatgttaagacactggtttaaggactttaaatgtattaactcattaaagcttagaataatcctatatgctagataagattatttacattgtaaaggaaacagaaacacaaagatattaagtaacttgccaaaggactacatggctggtaagtgacagaaacaaggcttaaaatccaaactgtctgattgcagagcccaggttctaaactcctatatcttatgcctccccaatagtacacggtgtaaagaatattttaaaaaccttgatgaaatgcttggttcacttaacttattctaggaactttcctctaaaataacatttactaaaaggctaggtaaaagatttaggaaaaatcaaaattaaaaattagcctttttcccccttctcattcatctagtttaaactaaaacaagacaatctggattccaaaattctgacatctggatgccaaattggggcactcctccttgaggctttcaatagtaaaggaaacatatggmccactcttgggtcctttgatgagcagaattatgctgcataagttaattgttcaaaacaatgatcagaaaagacaggtacagaagagagaggcttttgagataaaataagattttaaaaaatatgtcactagaatcatagcaggagcttttgagagcttttgcagagaatatattgaataacatttgtggaaataatgattctgacttccagatgtgaaaataaatggttgcaaataatggaaaatttatgttggggtgtgagtagagtataagatatctgatctaatgtattttaaaaactttttcttctttgacaaaaacacagaacacattttaagccgcttatattttcctcattagctatggattacagccaccaagcaaggggtgaaagctggaacattcttttggtctgtgtaagttacctttattttgtcaatgtttataaaatgacagctatgattcaatttctaaaacatcaatttaagttttattttgtttcagttaaatgtgaaaatatagaacttttgaatatttactaaatcaaaataaccttccaggtgtttttttcctgagatcctccctctgtgcctcatcctaccttctttttgtcctccagctctccttttttccatcctgtctctctctattttttttttttttgagatggagtcttgccctgtcacccaggctagagtgcagtggcgcaatcttggctcactgcaacctctgcctcccgggttcaagtgattctcctgcctcagcctcccaagtggctggaattacaggcacctgctaccactcccggctaattttttgtatctttagtagagacagggtttcaccacrtttgcgaggctggtctcaaactcctgaccttgtgatcctcccgcctctgtctcccaaagtgctgggattacaggcatgagccaccgtgcccagccccatcctctcaacagaatgtaagatggtctctcctccttccggatgtcctttagatttttctattcctgtttgtaggtttttggtaacttgccatctaggacatgtatatttctcttagactatttatggcagtggctgtcgttatcattttctataaatatatgacaacatattatatttattttggttcacaacttaaaaatatctagatggtctcaggcctctggggagccgaaggagtcgtctagagattgaaagttccagacaggagaccaaggggaagcctctattttcacctcattttcccactgaactccaggatttttctaataagaaagtggggctccttcccatccctaaagaagtgatggggggataagcagttaatgttcataagccttaagatgaatcttacctaataaaagtatcaacatgttgatgatttttaaggttccttagtaagaaaaggaatctgtttcaactttcacggggattttgttcccactgagatgttctttccatcttttttttttttttaaaccacctaaagctgtttctgtatttgcctgtatgcctaacaaaaatctgactattctataatagcagtgtgctgagagctactgcaggctcaaattaatccagaacggtactgtctatactctctaaaatcagaaataaaagtagctttttcagatttgaagggctaaattgaaattgggtttggtgatttgaatctagcacacactgtccctttaagagatttctttctttcttttttttttttttaaagaggtttctgagctgagaagtaagtgtaggtaggttggaaatgatactgcttaatataaacagcatgttgatttaccagtgttatcctatgtgtgacatttctttaactcttgactgtcatagacgctcatagaagtattttcttctgttctgtaacatatttgcctggcagaatggagaggagccaacaacataattaatactgagtccccacctttgcccccctgaaactgctgcaaagcctcattgaaaaggcccagtgttctggttttgaatggcaattttctccacccatttgaaatcacttataagaaggtggcttttgtatgctccaaagatgtctgtagctttcatttgcttctcagactattattttaactctgtatcctgaaagtgacttggattcattttttccccttttttttgaagtattttacaactttaaaaaaataggatcacactttcagttagttaagagaatatatacgtcaaggaaatctacacagtgtatattctgaaaacttaaaaaaatttagaacctgattcaaaccatagacttagactttgaaggccatctttttaacatggttccgtactgcaacctagaattattcttgccttttaaatgatagtatttcattctgaaataatcttcggctgatgctccattcttttgtgccaattcatgttcaaagacagtaattcccattatgtatgattgttyacgttgattctcatcccagcttggctgcttattagattggtgaccttggactagtgatttaatctctcaacaaatccatgtcctcatcttcaaataaaaattacagtatcttcggctgggtatggtggctcacgcctgtaatcccagcactttgggggctgaggtgggcagatcacctgaggtcaggagttcgagaccagcctattcaacatggagaaccctcgtctctcctaaaaaaaaaaaaatacaaaattagctgggcatggggacacatgtctgtaatcccagctacctgggaggctgaggcaggagaatggcttgaacctgggaggcagaggtttcggtgagctgagatcatgccattgcactccaacctgggcaacaagagtgaaactctgtctcaaaaaaaaaaatacacacacacacacacacacacacacacacacacayatatggtatcttcatcatgggatgttgcaaagatgcaatgagctaacatatttaaaatgcttatggccgggcctgggggctcatgcctgtagtctcagcactttggaaggcaggtggatcgcttgagcacaggagtttgagaccaagctgggcaacatggcaaaaccccatctctccaaaatatacgaaaattagccaggcatggtggcacgtgcctatagtcccagctacttgggagactgaggtgggaggatcaccaagcccgaggagtttgaggctgcagtgagctgagatggcaccactgcaccccagcctgggcaacagagtgagaccctgtctcaaaaataaaataaaataggccgggtgcagtggctcaagcctgtaatcccagcactttgggaggccaaggtgggtggatcacaaggtcaggagatggagaacatcctggctaacacggtgaaaccccctctctactaaaaatacaaaaaattagccaggcgtggtggtgggcgcctgtaatcccagctactcaggaggctgaggcaggagaatggtgtgaacccaggaggcggagcttgcagtgagccgagaccatgccactgcactctagcctgggaracagagcaagactccatctcaaaaaataaaaaataaaataaaataaaacaacataaaatgcttattagggtatttggtacacagagaacaactaataaatggtatttgttttcttattcacattctctctttcaacattgactagacaagggctatatatgacttaagataatttgctctcctttactagtaaatacttaacttagtctttttttttttttttgaccatttctaatatacttggtctcatgacaaattctccatcaatcagtggtggtgaagacagcaacatgtaccccatttctttttttgctctttcttggtcagatttatttgtgctgtctgcgcattgtatttgaatatttgaaatgctaatggctaagggccatgtccttttggtctctgaggttatttcataaagataatctagaactcctaggaaacagaggcaaccttgcccaactcctcatttaagagattagaggctgggtgtggtggctcatgcctgtaattccagcactttgggaggctgaggcgggtggatcacttgaggtcaggagttcaaaaccagcctggccaacatggtgaaaccccgtctctactaaaaatacaaaaattagccaggcgtggtggcaggcacctttaatcccagctacttgggaggctgaggcaggagaatcgcttgaaccggggaggtggaggttgcagtgagccgagattgtgtcactgcactccagcctaggcgacagagcaagactccatctcaacaacaacaaccaaaaaaaaaaaaaaagagagagagattgagaggttagaacactaaggcctagagaggttaaatgttgcacctgaggtcagaggtaggatggctactcagacctccagcgtcctcatcttattctcaacacaaacacaatcagcccctgcccagaaaagaattatcacttgcttatctttcccccaagaaaatgacgacccctccataatagtctttttggtaggaatatctttatttacgtttacacaaatgccttaaacccaatatgcccttaacaaatattttgtgaatgaatatatcatctctgcagacctatacatttagtatataacaataaaagctaacatttttctaaaccctttctatgtgcccagcactattctaaatgcttttcactattctaaatgtattctcttttcacctttactacaactttatgagataggtactattatattgtcctcgttttccagaggcatcaaaagtttagataacttgccaagtcttatcaccagcatttgttggagtcaggatacaaacccaagcactctggcctcatagctggcacttttaattccccgtctaccattgttcaagtaccccatccaaygagggcattcaggggtgagcattctgagcttgacacagatkctgttagtttgtatttttccattagtattgaaagtgggttcattagggcccgtttctgtggcttaacaccaattacgtaaaataaagcagcttttaggcaggtagtgaaataaagtataatgaaaaggctctggcattcactttttttttttaaacaggaaagaattcaaagtatgcaattattttgctcagatacaaaggatttctaaagctgaagaattaaattccttaagtgattaacctggctttgctctgcctatttctaattcaattataggatatagtgatcagggtcrcatttatccaatagcattggaatatgtttaaatttggactcattttatggcacacatgattttctggtcttgtgtgatagttccagaaagagagggtgcctggggaatgacaaatccctgtgagctggatggtgatgggggaggaaragaaaccacttgatgagagccccggcttgaggatttatccttctcccagctctctcactgctcatgtccactgagagtaaaagtttaaatggctcaccaatgttccacaataatttttcmtgaccacatttaaacttgtgctttagtttgaattcatcatgaacatgcctctaatgcctggtcttggatcggggagtgaaaatgcattttgtgctccctgttgggaaagagtgggtgaatttcccctgactaaagatatcactcagcttgtgagcatctgaatgtaactcagccggggatgcaatactgtcatgttagctgcgaggccttagagcccttaaagctagtgccagacttagggtaattatatttcaacagaggaaagagacttaaacacaaaagttattgtggatgaagattataccctttttgtcagtctcttaattatatgtgcctattctttttttttttttttgagacagagtttcactcttgttgcccaggctgtagtgtaatgctgtaatcttggctcactgcaacctctgcctcctggattcaagcgattctcttgcctcagcctcccaagtagctgggattacaggcatgtgccaccatgcctggctaattttgtatttttagtagtgacggggttttgccatgctggtcaggctggtctcgaactcctgacctcaggtgatctgcctgcctcggcttcccaaaatgctgggattataggcatgagccactgcacctggcctattcttggtagatttttacagggctggaagaaaatggcaagaataccttccctaacccattattttatagaggaggaacttaaagtttcaggttagrtagtgtttctaaagtcataccrttatttagaggcagaatgataacgcattatgatcattaataaaaatatgtttttaaagaacttactgtgtcttasgcactggacatgccctttccttgtcttgtctcatttcatccttacaaccaagctgtacagtgtyctttgctgttagctttatcttaccgatgagtaaactgagaccgagtggtcaagagaggtcacaccgccagcaagaggcggattggggatgtaagtactgatccctttatggccacagctaaaggctcgacagaataaatgacaatgattctgaaaccagggtcctttctgcttgtagtggagtttctgattagcaagacaggttcctcattctgactgtgaatcagagtttccagtgtagtcttctgtggaagaggttgagcaacgtaatatgttgcaaatggaaatagtagtttaaacgctaattcgaaagagggccttttactacaaatgaartgaaaacagatggtggtaaatagagagcatttggcctgggtgcaagagcgagcactcctcaggcttgagtttgcrgaaatgaaacctaacaacatgctttgcttgcttttaccctccagtgtcatccctcacgagcggagaatattaaccatattgcagtggctcaccctgccagatcatgagaggtatttatttctctctttcttctttcttcagtacatttctatcttagtttagaattgcgtgaaacactagactgtggaatagaagcacagccaatgtttggaattaaaagttttgtggttcttagccttaagtgttacttccctaagaaggatacaatagactttggttattgggaccatttaattacttggattactgcagctattaattctgtccactacagcagagccgaagggagtttctggctttgataaatgaaccagcagcatcccaaggattgcagaagtataaagagagacgcttctctgtaatgcagttagttgttgtttcaggctgcagattgcacggcccawgtgaattaccgccaggctctgttatcttgagggtcaaggatccgagtacaggttcaagttttcctttgtgacttttgattcctgaaggtggttccagacagttactacagatggggtggtggtcacagaagcaacagaaaaaaaaaaaagtttttcatgctaacatgaatagtagttaaaggataaattaaacttgagaacatttttttttaaatgcgttttttaaaaatatgtgatattttttgttacatgtggtttaggagagattctgaaccttccaattttcttataggccttcggtctatgccttctattctgagcaacctgatttctctggacacaaatatggccctttcggccctgaggttagtggtttagcatctgcctgagaagaatctgtggccctgggctacctgatctactgactttatttcaggaattgtataaagtctggatggatgtttgtatctacaaggtttatgcaaagtcaaataactacaagactaaaaattttttaaaaaatcttaaaacgacctgtttctgttacaggagcttcatttcagattgatttgatatttaaataataatatatcctaaacttgatgttaacaggagatggggtgtattctagccttgtgggcgtcagttggagggtraataattcggaagagttggcatttgccttcaatgggctaggcatggaaaaaaatcttgagatgaaacctgcaatgcaaaacattgtaaatgaatttcagcacccttgaaatgattaggcagtttagagagggtagatcagctaagcagctccaataaccttggcagatataatacaatcaacttggcataagttatagtaatggacccttttgaatttaatacattttggcataggtatatatactgtgaaattgtcaccacattcaagatatgaacatagtcatcacccccccaaagtaacataaattcttgagaaaaatataccactgaatgaatctgyttagcagagcaggctgactttttttttttttttttttttgagacagagtcttgctccgtcacctaggctggagtgcagtggtgtgatcttggctcactgcaacctccacctcccaggttcaagtgattctcctgtctcagcctcccgagtagctgggattacaggcgtgcaccaccatgctcggctaatttttgtatttttagtagggacaggcttccgccatgttgtgccaggctggtctctaactcctgacctcaggtgatccaccagccttggcctcccaaagtgctgggattgcaggcgtgagccaccacacccagctgagggtgacatatttttatcaaacactcagccatcattgtggaagacaatctgtgaggtagtrtccagtayaatttcaaattcagaaggtgggaaaggaatggttagaaatgttcccacattttcagcatagatagtaaaaaatatgatggagtttgcaaatctaaccttttaaatatttttaaatatttaagtagcctagtaacccataggacactgctgactataattaagttcattgttttcagatgaattagaaatacaggtaaacatatcttggtttaaacatacttggttaaacatacttggtttaagtatttttgacaatacttaagttttttgacaatacttaagtattttgacaatacttgcagcatgtgaccaaggagtcataagtgtttctgaatgctttgacatcaattcagaggtgatttatttaagcactagtaactaatagctacgtaaaaccactcttagtcttaaatcactgaagttatataagtcagatgctctttttctgtccctttgaagtttaacccgtcttgtatgattgtgaaacacaaatgataaaatgagataaacatctgcatacatgatgccagtaaagaacaccaaagcaagaatggctgttttatttttagattgactttctttgagattaacctaaagggaacaaaaggaaccacattttatcaaaatgttcacaaaacaaaacaaaacacctaagcagttccatgttccctacttaaaagtttgacttcttgggtaatagcatcccctcaaagaacctgtggggtaggcaaaacggattggtatagccatccttttaaaagtaggactccggtactttcgcttggctgctaaggggagaacctgaagatagcactacagaacttttgactcccagagcacactcccttccatggaaccatttaaccctcctgcagtccaggagataagcaaagtggtcagttaataactatgttcaaattatacagaacattttctttatggcaaaagtttggcttttaataatacagatgaggtataactcaaaccttaaaagttatatggcttaatgataaatgttcttaatcaataaacatctttgggtttctaatatgtgtagttcagttacaattaaatgcatgaaagtatatgtttgtgtgaattaagaaacaaataagtttttttgaaagtactgagtagggaataaatgaagcggcatacaggatgctttaatttgctataataatttttctatgcccagggttgctcacaaatatataaacagagatttttcctatagtacctttgaattaagagttgaaagtattcatgttatgtttttttcagtattactacttcttgcagctagggtattttcatatgcctactggataaactcttaattgggtatcttggagtatatcttcagtaatggtaatctgataacctggtcattttcttctcataaggcaaaggatattttcagatttcaattatttctcatctggttctaggaatcttattttaactgaatgaaaaacaaaatagtttatgcttttaaaacatgaaaccaaagcaagtcagcaaaaattctcttctattgtaggctaattggtttatacacctgtgtatcctatatgcctacctatatatcatcatttacacttattatacatgaaaagattataacatactagttgaaagattattttaaaatcagtaacgtatcttttacatataagaaaataacctatatttgaaatttcattgaaatgattttaactaccaaaatgctatatgctacaataagatgaattcagttgaaatttgtgctttatttgctaaatatttgagtccacattttttcagaatgattctcaaaagctattaaatgagatgaccaaacattgagttaatagttcaagaaatggtgtattgctcctggtttcagagtgtaatggtgaatgttcaaaaatatgcttgcttttgattattggcgcaatctttttctttttgaccttctatgctttttctgtgaccccttgttcggctgctcttccgggcctacaggcagagctttggctggctagtctctaccttcagatggcaaagtatcctgaaatgcagggaaatttgcacctctacctcccatcctcttaataacctcaggctaaaatttctaaattcaggctaaagtatggctggtcagtgaaaacttagctttcatgtacctctaacatttgaagaaggaaatacatgcgatataatcactggatgaaaacccagtttgactaaaccctactcttctgctcctctaacctgctgcaattggaagggctcatctttggagtctttggaatgttgaggtctcttgcaaatggcatagagtttgatgggccgacttgagcgctagcagaatgtattcagtgaccatgaaacggaaaatcctcttttccttttgctgcttttcttatggagatttgcctaaaactaggagcattaaaaaacaaacaaacaaawccaaagtctttggggctgtgtcttttgattgctttggtggagagagaggatgagacagaaacagaagtgcctttgccatggcttgccctggaaacagtgaaatcgcatggcagatgttccccttcttggatacactaacattgttcctcctcccgccccttcctgcatctgaatggctctcaagacattccccccacccaccctccgagagaagtcagtgaggtagacagcaaggcttgctgctttaattcacctttgcaccatcagcaaatcaggggcctgtttttcctccagcatttggaaatcccaaaaggttatcttcagtttatgtgtcaacttcactgctctctggattttcaaaacaaaacccatagcatgcaacgccccttaaaagcaggtttctgatagcaagagcataaggagactctttcttggtctgtatataccaagacraaaaagagatgactttttgatgactttttagattttacctaattttaaaaggactttaacttagagttcctctgtactgaaaaccttaattgtcagtgagttctctctcctgctgaaagtcctgatttgtgggagtacgtttatgattaaggaggattacttattatttatgtttcattccgtccttggttttaaaatttttcactggatccttgccaatgaaggtgacagttgctttgacatagttgctgacgtgaacagaaagataactgtcagattctgaattggaatcacttacatgaacctcattgtcctcttgaaatgaccaagtggctagtatttagcctacttttcagttagttctttataaatggagagcttttcataaccaaagaccagtctctccctaatgcaggagttatggaatacagagcttgtctaatgccaccttcccatacatccataaatatcagccaaaagaaacccacatgactagattttcttaaattggattcttgttctcagcgaagaagctgtgacaacagtatcaacatcaatttaggaggcttctctccatagagttcctctaatcatccatccctcattccaattttttctcacttaaggagccttagttattctgagactctgctgatcccagatgggaaagtgtaagctttatatctgactcagagggacagacgacttctgagtccagacatctctatccgccagtacaggagagtagttatggctcaccttttactccggctaagagacctaagaggaaagttgcccctaagaggagacaggaaagaccagttgctcctccaaagaaaagaagaagaaaaatacataggatggatcattatgctgcggaaactcgtcaggacaaagtaagtttatctrttgttccaaagctttgtggcgggcaggtctgagttgaaggttgccttcagtgccttggttggaaaatcggctgagcaagttttagaaaaactctggtgcattgaccttggctttgagtccagaagaatgtggtacttcagaggttaacactgatgtgaagactgcctgaactcaacatgacaggaaaaaaagaagtcttttcctttttttaagagttagttgccctaaaactagtattaacatttaggctggagtgactattaagaktgcacttattcacagaatcagtcacatggtttgtggccctggttcttgagaacaaccctgcaaggtaaaaggaggtattctcaaagacaatgtggattagaactcaataggaagttggcttagattaggggtctgtaccttcagagatcagaaaaggtgtaggttatagagaaggaaatagctaagacagaaagaaagagaaaataatgggcggatagagttgtatgtaatttccacaagtaatgtctactcttcccagtatgttcagaagagcctatcggttgttgcttttcctaaaacctttgaatacctctgaggcagtatcttatttgtgatcctctgaactgatccctaagaagtaggttctggattttacctgagtcatcctgctgagtaaaggaaaataagtcattgccaaagatcaaaacacattgttcatttggtatttctttacctagacagagatcttggagcagagcatgattttctcagaagcaaataccactttgttccacacccgttagtcccttccgattattctgcacatgtctttctgaaactttcaactgtggcttcctccttgggataggacttgaaatactgactcccgtcatgaagaaaaaaacaaaagtttacacctgatttcccaatgaaataacaggaggaaaggtcttgattcatctgagaagatgctagtggaagataatattatgtgtccgagtaaaaatgatattcacatcctttctgttcttatcttaatcatcttgggtatatttatgtgattgttagctaagctataaaattcatctaaatatactccctgtatctttctattctttgtctgatcagatgtttcttaaaaatctttccattgcacagctaaagatgaaagggggatggagagcctctagtatgtgaggacattcatgctgttagaaacttccatttgaagtaagaaaatgagatatgggtaatgttttttaggctttggaaatggtcttcagaaaagaattgagttttcatattttgttaaagaagaaaccttctagaacaaactcatggttcacttctttttaagttaggactcttatagattcttgtttcactcaaaatcagctttaaaagaactaaagtgagaagcaataacttgtttcttagaataggttcttctgttaagaatctattgctttcagatgccaacagttaaattacttagaacaagatggatctcattgtattaatgatattctaatttattatccagtgcaacgttgtgattttaacctcagaacagctttgaattcacttagcgtctatcttcttgccatagttcaaaatctaatgtgatttcacttagggactttctgtttactctcaaaactcttggatttaaaggatgctgtcacatattagaaagtcgattttctctcttaaagaattttcattaacaatatttttgacatttttatatcaaagaatctttaaagggattggatgaggagaggttttaattctgtcaaaagaatacaaatataacgtgcttagaccagatttcattaagaatggcaggcaaatctccccagacaaagctctgcctctgggccggaagttttctttccaaaatgttctaggggtagaagatctatgagagactgaaagggaaagaaagaaaaccctgtggggactaacttgcttctttttcctagatgacaaatcctctgagggaaatcgacaaaattgtggggcaattaatggatggactgaaacaactaaaactgcatcggtgtgtcaacgtcatctttgtcggagaccatggtaaagctttgttttttctttgctaataggatagatggataatgtttctgatcatattgaggaaaagaatccttgcccttagaagccaagactccattcttaacctcatccccgctttctttaagatggggatagaaatcaggccatgattgaaaagtatgagatgacctgagagatccctgggttcattttgatcaaaagctgggacttcttatatatttctgttatttgcaggaaagacctttctacaaaaatctgtctctctttaaagcaacacagacagtttccttgtgacattaatagcttcttctgtgaatgtgacatatcaggtgataatctyctatccctgccagccacatccccaaaacgagcccatggagtttatatggttaaaaaatacatctaaatatgataaagaagcagagatatgggattcttgtcaaagaagtggcgtgtaagtcaaatcatttccccgaatccactgagggaagtcaaggtccaaaccggaaggccctgctgtaattcagatgactgttaaagagaggaagaagcattataggaagtagtttttctaaatcccactttatgaagtagaaaaatttatgatcaattctttgaggagatcaagagcatcataaacattatatgactgtagagctgtgcagggggtgggggctcagagacatgcagactgagttctaaagggtatctcctgtattccggaactattagattgaaacagtagcattggaatttggggcttctcccttctagtggagttcggaggatgaaaattggctgactctttggcagttctgttaagaatggtaggcaaatctccctagctctggtcctgaaggtctttccagaatgtcctagaagatctatgagaaattagaaaaaaaaaaaaaaaaaaaaaaaaaaaagccaaagggattagctttctcctcttgagtgggctagatataaccctttgcgaagtcatgctccatgcattcggcttagtggagagctacacacaggtcagagaagttggagcatgtgtcacagctgattcaatttaagttgcccagaggtgtcaagagcatttgctcacatgctggagccagacatctaagtagaagggtcccaatgatatgtgctgaggcattgtaaaggtcatggataggttaaaaccttggcttgtcagtgtgtaggcttccaagatgagtagatccatttggtttgggacaactacagcacttcttcttcttcttttttttttttttttttttttttgaggtggagtttcactctcatcgcccaagatggaatgcaatggtgcaatcttggctcactgcaacctccacctcccgggttcaagtgattctcctgcctcagcctcctgagtagctgggattacaggcacctgccaccaggcccggctaaattttgtatttttagtagacatgggctttcaccatgttggccaggccggtctcgaagtcctggcctcaggtgatctgcctgccttggcctcccaaagtgtacagcacctctctcttaaaagatggtatggtttagtgttttagggcatggtctttggagtcataatgaattttagtggagttcaaattgcactgtgtcatttaacagctatctgacactatacaccttttgtggcaagtctcagtttcctcatctgtcaggtgagaacattaacacccctccacaaagttagtctgcagagtgaaggctgatgacgcttgaggagcacttagcatagtgcctgatggacttcaaaagtaaaggagattgctcacatttggggtggcataagggacttcctagaaatataacaaatgggaaagactttcagccctctattaataggtatttggggactttcccttcccacgctaacattgtactaaaacatagtagctcttcattgctctatttttcttcctaagggtttaactgttaaagtgcaagatatataatccttatgctgtgtgttttttcttgcatttcattccaatttgtattaaacaagggaaggttctggatctgggatcctaggaggtgattagttaaattttaccagatctggggtactctgggttgtatttccttattttaaaacctttgggcatcctttacaggatataaatatatgagtattctccaacagggttattttccctgttagagaatatgtacatactgaattgtactgagcaatatattaaaacgttccaggtcatctcatacatttcaataagatctctagtagcctccatagtctatgatgctaagatttgagtttacaacaatgttttaaataaaagcattttaataaaagaattttccttgatggggacacacaacaaatcttggggtggaggagaaatatttgttgtttaaaaaaattccctacctagaaccttcttgctttagttgctagctttcagttctgactaattacattgtttacaacttgttttcagtgttattttgtttttcagtttgggtggtcattggaactgacatttttctttctcatctcttgttgccagtattgttttgtcagtaacatccaaggccaccagtggagacagtgaggactggtgattatgtactcaagacaggagatatattagagagttggaaaatgacattttgtaaaagagacacagaactgtatattccatttataccacccccagctgggaagagtttgatgcaacctagggtttttttttttttttttttttaaagaatagatctttttcataaagactctgtcaatagttatgtttgttgttgttgttgtttaaatcatggtgacttcctttgtcttgctattctggctgagtgacttaaaatgtaatcgaggtaatgcactttcaaccttctagtgcttgcaagatgatatggctaagtaaaagtctagagaaaagattatacagagaagccttaaaccatttaaagtcaaatacaaaaatctcaaaagtcagggctcttcccattaagttactaaaaactaactaaagagatgcctggatgttatctttcgtgtctatgttaagattttcrttttartcttgcctgaaaatattctttttctccctccccataggaatggaagatgtcacatgtgatagaactgagttcttgagtaattacctaactaatgtggatgatattactttagtgcctggaactctaggaagaattcgatccaaatttagcaacaatgctaaatgtaagttgattcttaaaatattaagtggttagagtggtaatacaaaggaataggtaagggcttgttttctaaagctgaaatacttgggtaaaaattctggctctgctaccgcttagctgagtgaccttaaataagtcatttagactctaagcctcagttttttcatctgaaaaatggggatgataaatgctagcagctacctgtagaaattaatctatgcatattgcttagagtggttcctggcacatagtagcattatataaatatttgctcttattcttattatgtggaaattgcacttagtttgaagcatattcatgaccataaacagaagtttataagataagaattttttcaataagaagttcaggctgatcatttttatagatgaaactagagggtctatgtaagggttggcagaaccacatttggactgtgggsgttcctaggagccttgtggaatggagtccattctctttgtaaaagtgattggtagaacctagtaggaaaagatattaagcccttgggaagtggcagctgtcctgaaagattagaaataaaaataaacaggaataatcttgtcacttatgttttacatgttcaggttatgatctaccactgatacaaacttaatttgtggactaagatttttaggtgctgtctacctagcttttgagaagtccatagttttattggggttatgccgcactttgaaaaaaaaattctttagagtttttagccttgggaataagaaaccattgacaccaaccttacagctttggaaaattaagtttttccctaattatgttcctgagtcaacacaactggaactgttccagggtcagctccagaccatgttgtgaaataaacaaaatgtgggtgtttctgccctctctcctccatgacctttcctgtccctgtgtcctcccttttctgccctcgcatagactggatgcagtcactatggcacccctcgattttagtatttgcacttcagggctatgcaaaaaagattttctctatttttaacaatatttctgacattagtacatgtaatggggaggttggtttggaggagaaaaaaaaaccttcccatggcccatgaattcataactatcaatgataaaaatttttgtactttacaaaaacactttccaatgtggtttcattttgtgggagacagtagcatggggtggtgacaggcacagatgtctgggttcatatctcagctctgctcggtactcaccatgtgacgccctgtacctctgcttcctcatctgcaaggtaaggattgttaggaagattaaacaagagattgtgtttacataatttagatcagtgcttagcacatagtcaaagctatataaaggttggatatgatgatgatgtcttagtcataccactatttcagatagagacacacacacatacacatacactcttatttaatccttttaatagcattgtgtgataagtatcactatcccttttatagacagtagaaattgaggctcagagaggggtgagggaactagcttcgaggatgatggttagtaagtttcagatctgagatttgaagccagattagctgaaccactgccctttcttcacacaaaatgaggactgttagcctgcaaagactaagttcttcagaattgaaggattgatgtccccagtatggactcaggcattggatattcctagtaattctctgggacttatctgagtacatgctatttacttctcttcattgtcaaagaccatgaacttactttatttcgtccctttgaggaatatgatttatgaggcctggcttgctcaatcaggttgcttgagtgtcagagtgccaactcctcctccttctgaaaacccattggcttagtgaggatttgaacagcatttacctcctagggttattgtgaatgaccagagagaaagtgcctgcaaagctcttttttttttttttttttttttttgaggcggagttttgttctgtcgcccaggctggagtgcagtggctccatcttggctcactgcaacctctgcctcctgggttcaagcaattctcctgcctcagcttcccaagtagctgggactacaggcacatgccaccaagcctggctaattttttgtatttttagtagagacgggatttcaccatgttagccaggatggtctcgatctcctgaacttgtgatccacccacccctgcctctcaaagtgctgggattacaggcatcactgtatctggccacctgcagagctcttatagaaagacaggcacatagtatgaaatctattcgggctattattattacattattacttatttgccttctagtaagagatgyaattaaggccaatggaatacacattttagtttcggatttcaagctttagagctaagattctgaaaatagactttggagtctgtatatttatatcccaaggcaagtttattcatacatttttaacaaatatgaacaaatatttattaacaaatgtatattgagtgtctactctgaacaggcccagggatgcagcagcacgtgatacagataaggcctgctccactggtatttagatgccagggagggctgcctcatgatagttgctatctcttctgaacaccactttccttttctgctgattctgtaataacatactgaagcaaacttcctgaaaacaaaacaaaatccaagcaacctacaatctcctctttctccccacattccgcccaaaaggggagcttcagataatataatcctgtccacagtttatgcacagccatcatttacataattttgcttttagctagttcagagtattgactaaaatcttttacttgatrctattgaaaataaaggaggtgcatgcacgtgtgtgtctatggctggagaggtgcggctacctgtgtaattacacccaggatataaatagggaaacaaactcccttttaaaaaaataactcaatggattagaagtttcaacttaaagtgggtgaagacttgtttcaaaaatctgcagataaataagaagttacattaaaagccccaaatgcccagtttagttcctgaggtcaaactgcaaataaattatgtctcaaggggaaccattagggggaacttaaaacaagaagcaatttacctagcagtatcctggtgctatggaaggaggaattccctccagaagagcagaactggacctaggagggcagtttactataggatttgttccacttgcttagctgcatgtcantgactgaaatgttaaatacccctacacaattatttatctttcaaacaaaacactaaagtgatagtcttctgtgggatggaaggagaaagaattgagtatcttgctgnaaaaatgatttctcttggtaatggttgttatttcttttgaaatctttctcctctctttgaacagatgaccccaaagccattattgccaatctcacggtaagtgtttccagttgtcccgcctctgccctgcccagncctctgcccctggagcagcctccctcctgtgtgtgcctcccccggcggggaggggtgggaggaacactttcctcactgccctgccatcctgtatatttgtttccttaagaactttcaaaacttctggcctgtggtcagctgcaggctccctaatggtcttggcaatgatacaaatggagaatatctgatccttccattagaactgaaaagtattcattcatggttaaacaaatctttactttccctgaaccagaactgcccacccactctgctccattgttcccggatgctgggtagcgaccttagtggtacaagagcatctaatcagataagcctaaacccatgtgctcctcccctcccaccgacaccccacccccaactgcttgacttgaaggagttgggaaaggccttggagtgtgaattgctcttagcgatggtctcacaagccaggaatgcatcttaaaattcctaactgtcctcagatagcctgtcatatcatctccaaggttacttaatctcttttgaatctatttgttttcagcatacattatttaatagaaataaatttcatttattcactcattaacctttggttaggcttaaaatctccttcagctttctagagagagaatttgtaagaatttttccaaaagacattccatctgaagtctgatttccatttctatttcagtgtaaaaaaccagatcagcactttaagccttacttgaaacagcaccttcccaaacgtttgcactatgccaacaacaraagaattgaggatatccatttattggtggaacgcagatggcatgttgcaaggtaactggtatatgggctatttctgtttctyatttccacaaccacccctttggcaactggaaatattttatcatycttagtcatcactgaaagaaatatcagttggaaatctcactgtttccaaagattttgtgggctacataaaccatcagtgctgagacaatatatctctatgttctgggtctcagcattgtggtgtctctttgcagtctgtcagtgcatctgtgtgtgtgtgtgtgtgtgtgtgtgtgtgtgkctctttcatcctttgaatttacattctaaactctattcttactacttgagtaagtcaaaagtataaatgggagcttgccttagtatattgggctgatttgatctcggttgttgagactttgcttgtagcaatatttatagaggactttagaaaatgttgttaatgttaaaaactctgttattgtgggcactttttacattgctttaaatattcccaatgtttgccttctattgaactacaaaacactctccaatgttgaagagaatgttccttgcttttgaatgtggtctaggacatgtctggaggctctaacaacttccaatgagttaattattaaggatttatccattttcacacagacctggaagtagctgttcccactcactcttgctccaactttctacttaagaaaagtgctgtgaatttgtctatctcaataattgaacaactgccacatgtactctagctgggtactagtttgcaagagaaagaagataacaagaaaatatttagaaactcaagttctaagaagaacttagaactctagaaacttgtatcagtatgggatgtttagagagacacatttgacagatacataaatatcatgctgtaattttccagkgtgtacttagagttagatatgtgggattatgaagaaagatgtacgaagaacaggaattattggagtcttctaaaacagttgtgggaaatcctcatggagaatttactggcctggtaaattaattgggaygtgactgaaattaattggcccggtatgtgctcctgaaggaccttttatgtatggggcagcttggaaggggtcacactggcgcaggtagtaggttcatatggcaaaaacatgggagctgagtagaagttaagtgaaagatgatgacagttgggcaaattagtgtagcccaaaaccaggcatgttggttaacaatgcatcttttaaatttaactyatcttgcattgttgaggtattgtatgcatatgtcttattatcccaagcccttatttttccaagggtggagacccgtatgttagattttttgttttcccaaagcactttcagtgctatatacccataggtacttaggaaatatttgtattaaattaacatgaaagctattttggaaaagggtcacatgacacttttgcaaaaggtgtcttctgtcacaaaaggaaagatcagatggtcttgatgtctagagagcagtatttctgttttctgtttctaaatagagatattgtctaggtgagaccatgcttttgtcagatatgtcatgattactgttaagttggctgcttagttgtactctagttgtattgtatattgatagataaatttgcatgcaaatatttttatagaatatagatctccattcattgtttaaacatcgcaaatttattttattttaaattttaaattattatgggtatataataggtgagacatcacatttttttaaagtgccaactatgtcttgacactgaccctagggaggggtacatagaagtgaaccagacaaacatggtcctagagtcgagaatcttacagtctcagagctagcgaagcacctagacaggcagagcatgacttttgacaagtgccctacttggtgtaagcacgagctccaaggagrgcatcgtgacttcagttcacaggtcgccatttatcctgcaataactgtcaaagaaaagtcacttggagaaatgcataggatyctcttttcatcatcacaagaagaatgcaattaaaatagaggcaaactttcaaaagccccttcttagatattctttgtaccctgaaattacctttttatcaaagtaatttcatgagaaattctaactaatcatgaaattgtttcaatttaggaaacctttggatgtttataagaaaccatcaggaaaatgctttttccagggagaccacggatttgataacaaggtcaacagcatgcaggtatgatggcagaactgtgaattgaaattgtgttttagtggttcttcgaaaggataagtaatggtggtgtgagtgaagttgtacagtattcataaatagaggaagggttcctacctaacaatgcttaactgtttttgtttttcttttcttttggaagactgtttttgtaggttatggcycaacatttaagtacaagactaaagtgcctccatttgaaaacattgaactttacaatgttatgtgtggtaagtcactcatttaatcagaaccattgaaacaatctttagttagtatatatgatctttctcaatgtcagagaaagaaatgaggtgtctattttctgggactacctcctcttccccacaaaaggttgtaacttgcccattggttcaaagacagaatattatccccttctaaggcttctttgtcttccttcaacagttgactaatggggcgttttcatagtgttgctgttggcagcctctggctggtctaacatagcattacagtttgacaccactggtcagagacctgatgaagcaagagttctgcacagagtcccctccacctccatctcttgcattgcagcccagttaaaaatgttgccagcttgcatcctggccagctatttatgtgctcttaattatttttcttccttgaacttctagttgctgaatgaggacaacttttcctatttagtaagggagtgccagtctggtggttagagggggagtctgcaagtcgggtctcctgggttcttttcccatcttggctgctagctgtcccctgtcctgcctctgagctcaagcaagttactgaatacgcacttggcaaccattcacttgctatgaaatcagcctgttcattgctcagtggcacttcaggggacagggccaaagcctcctcatgtcccyacacttctgtggagtcattagagggcagacttctagttagttattgattataagtctcatttcaaaacatggaattaaatagtcccagagaagtgcaggaaaaagtgatactgacattgatcacccttgggttgtaactatcgcagatacaggcaatagttaatcaaagtcttgttccttcactctttctttctgggaatctctctctctctattcatggtcaggcaatgaacttgggtatttcagaaagctgtggcaagatgtagttagtccagaatggttcaggaggtaaggagggggtgcctgccatctacatttggttttgtccarytctgatttgtgttcacagttttcagacccatagaaggtgaagggttttaaatcttaccatatctcrtcaaaaaaatataagaagcacctgcctccttttcttaattttcattagatctcctgggattgaagccagctcctaataatgggacccayggaagtttgaatcatctcctgcgcactaataccttcaggccaaccatgccagaggaagttaccagacccaattatccagggattatgtaccttcagtctgattttgacctgggctgcacttgtgatgataaggtagagccaaaggtagaaataatctttatgtttattatggagaagtttgttgggtggctaacagtgctggcccatagaactttctgtgacaatggrcatggtctataattatgctgtccaaaatggtagctactggctagtgtgactgaggaactcaaatttttatttcrttactttataattaaagagccctatgtggcttgtggctaccatattgaatagcacaggtatagaccatgaaagacaaaaagtagaattcatgttgctattctgtgcagtcacagttctcaaccaaaatctttttctgttttcttcaactgtggatcacatgtctattagtcatggtcccgacgggagacaggtggcccatatagaagaggttttgaaagagagtttaggccaggtatggtggctcacgcctataatcccagcactttgggaggctgagatgggtggatgaattgaggtcaggagttccagaccagcttggtcaacatggtgaaaccctgtctctactaaaaacacaaaaaaattagccgggcatggtggcgctgggaggctgaggtgggagaatcgcttgaggcagaggttgcagtgagccgggattgtgtcaccacactccagcctggaagacggagtgagactctgactcaaaaaaaaaaaaaaggaaatgaaaaaaagagagagtttaaaggaattgtttcagtcatgtttaatgagtaatttaccaaggctgagcagggtggatggaattcaatgaggagtgacgaagtgccctggggttcgcatagtaccttctaaggtttaaagggtgaggggaaggagtaagtttccaaaacatggagagacaaccgaataggaaggaactattgtatttggccgatgagtgcagcttgttcattgcaacccagcagggagcactcccagataggrgagtgctaccgtcatcttcctcccctgtacttcctttcacatgtttccccttggtagagcccaacagggagccacagggcaagtttgctctttgatgccatccctagaggtcagcctcccaggccacagagcagggtgtgggagggtgcaacaaggatgcggtggtggtgcaaacagagactacccccacacactatgcttggacaggttttcttttttttttttttttttgagatggagtctcgctctgttgcccaggctggagtgcagtagtgtgatctcggcttactgcaacctctgcctcctgagttcaagttattctcctgcctcagcctcctgagtagctgggattacaggctcctgccaccatgcctggataatttttgtagttttagtagagacggggtttcactatgttggccaggctggtcttcaactcctgactcagctgatccacccgccttggcctcccaatatgttgagattacaggcgtgagccactgtgcctggccttatatatttattaaataacgtatgaagtaatcttttgtatagtttcctaaaataacctatactatagttttgcatgttgtaaaatttttaataaatgctattatactatatgtatcctgcaattattttatcattatgtttttgagacttaatgtatattagtacatgaagttttagctcacttatttttactgctaatacagtagttaatatttaattgtataaatgtaccataagaatttttttccattttcctacttgagaacatttagtaatttgcaaatgttagctcttacaacaatgttgccacagacattactggaaatgtcttcttgcacgcatatgctagggtatacagtgaagggtagagttgctgactcatgctgtttcagaattgctgagtcattaygttttagctttggtgaaaagtgatttcataaattagtttgggaatcacttcagtgtgcctagagattaatctgaaacatttaggcgctatcctaatttacttacacatatatgcccaagtcatcatcagtacccacatgggaaattggtactgtggtgactatccacagttttaaggaaggaaacagagattgaagaaggtgcttacaaacatagaactgctagaggtggagcccagaatgtcagtttgagagaaaacagttaattcctcgaaagaatgtatgatatagatggagtttagagttcgcttttgaatttagcagggtgctaagtygacagaagggcacagagggaaagaacatttctgatttgctttcttttttcctttactggttttcacacatgaagarcaagttggatgaactcaacaaacggcttcatacaaaagggtctacagaaggtaaggggtggttgcaaaataatcagataaggtttttctcgttttcgaaaatcgaaaaggcttcttatttacattatagtgtaagcacaatattgtttaaaattagaatttgtatttcaaagtgactttcatacctatctggcaaaggatattkgtttattccatgtacacaagatgccagctgtgtaataaaaaaattccaatagcttttctcccccctcaatagcttttaagccctctgaaaagtacacaatccattttgtatctgatgagtcataagacactgtggggcactcctataaagggaatgatagtcacaatgataaataatagcagctggtgcctatcctgaaggtatctacctcgagagtcagtgtatatatagatatatatatattgtgatagggagagattcaccgaaggaatcaaatcagaactccctcctcatatgaaggatcatctcaagccctaactcttactttacgtacaatgataacgagcacgtattagtgaactttcgcaagcttatgatatgaccaaaaaaaaaaaaaattagtgatttgtactaagakgcgtttctcgctcccattttagtgtgctggctgtaggccaagggcagctttgctccatgtgtattctttattctggaacccaggctgaaggagtagccttcatcagagacatgtcctgctcttgacagagggaaaagagtggcagaactgtgcactgtgtcttaatgcttctgcttttatgaggcatatgtcactccattcacagtttgctggccaaagctgagcacatgataccaatggtgtagggaagtacattttttccacggggactctatcctgcaagtcatatggcaatgggtggaggcagtaaataatgaggagcaataacacaatctaccatgcaggctctttttatctgattgtgaagtttcacaaaattggaggaaaatagaaggggaggggaagcctcctatacatgttactaaagtagatgggataacatgttgaaacagccaggaaatgactaaaagtgtatggaaaatgcagaaagaattcaagcatagcagccacaagtcatgcagcaaagatgcacgtggtcaaattctcctgagagcatcgcttgagttattagcttacatatggttctgtttatcatatatgctctttccaatctgattaagtagagttgaggaaaccggtagaagatttgatttacttgacttatttttcctcttttaaagatcttcatctgcctccttcttccttttctgtatctccatcatcccacttctccctttgatcacagaacacacagactctggcacagaacggaatgaatctcactttgaagataggccattgttggtagaaggcacacaaatctttcacaaactctacaagtgatttgcaatgttcgacacctaacctctagtggactatagtgtcattataattagaacaattagaacattgctagagtcaaaagatggggagtctcatgattcaagttttttagatatttagttgccaaggcagataaatactactcagatgcttctcttctaaaagtcactaatgaaattaattatggtaacttctattgaactcccatgattttgctgattcaaagtctgactgttcatggtactaaagcatttctgtctgagaaaaacattcctgcatttaatttgttggtggcagtgtccttatatgacaaaaccagtctcacaattcattataaacaataacctcagccgggcacagtggctcatgcctgtaatcccagcactctaggaggctgaggcaggtggattacctgaggtcaggagtttgagaccagcctggctaacatggtgaaaccccttctctactaaaaaaatacaaaaattagccgggcggcagtggcgcgtgcctgtaatcccagctacgtgggagactgaggcaggagaattgtttgaacctgggaggcagaggttgcagtgagctgagatcgcaccactgcactgcaacctgggcgacagagcgagactgtctcacaaacaaacaaacaacaacaacaacaaaaaaacacacacaatcacctcaaacttaagagcataaaaataagacacatcttcttagtgaatcactgactctcagggctataaggagctatagttagtaaggttacatctccattgctctgctctgagtggaacgtgagtttcttacttaaatccctgaagtgtctttttataccgctgaagcttaaagtttgtgtattttcatggaaacaaaccctcatggatacattcagcaagcatttgttgaatactgacactgggctggcactggttactctgacacaactgtaccactgagagtttctaattcatggcttcaaagtggtggcataaaatattaggggggaatctagaatagctcatgctattctaagtctgctcatggcctagtggcaccaacatttaatgacacaagagagccttcaaaaatatttgtcttattatgtgcaatgcatttccttgcttagatgctggaatatgtataaacctcaatgctctttctcctgttgctctctcctatcgctgtctcttgggctttgtttccttttgggctctatcttggtcatttcttcagtggcaaagcgatgttttcttggtctgagttctttcaggcctttatggtgtttcctgtgtcataaatttggcctcccatttaaaatattcagtgtctgccctactggaggagatccttgtgaatgtgaaccaccatgtatgtgagcacacatgtattatgttcagggcaattacttcccctttctaggtacctttgaatacatatgaaggcttttaaagtagtttgtaaacctaaacttctatacagatgtaaagttgtactatttttattattagttttttaaaacacagatgtaagtagttgatatttttcagaatatgtcatgagctatacacacttcacctgtaacatttatatgtgactgttttaatggcatatgctgtaaaatctgtcatacatctgtacaaaatacatgagtaaaagctgcatgttccaatagtgaaacgatcacagggatatctgtgataaaaaagaggtatgttaaaccaatcttgggcaatattttgctataaatatttaaactgttatggaatcaaatcctttactaaaataaagagaaagaaaaatgtaatcctcaaaaatggccatctaagctgcttgctaaactttaatatttctagataggtggtagactccaggtcttaattgcatgcctgttgttatttctggatctcatatacctaatgtcttggccgactttccatgcaatgaaaactcatttccttgtggcattgaattgatggatgaattaatgaatgaaaagaaaatttaaaaaatctcttgtagcaagcaattctggcactatagccaagtataattttcactgcaagaataattgcaccatttattttcaccttggtctttactctatttacattgctataaaaatgtttcatattttcttaggttagccctcaccatcatctttgtgaaaaaggaattaaaaataattttaacacctatgtatacttggctccttatcatacacaatgagaagttagtttggataggaaaatgacttaaacacagctgggtgcggtcagtggctcacacttgtaatcccaggactttgggaggccgaggtgggtggatcacctgaggtcaagagttcaaaaccagcctgaccaacatggtgaaaccccatctctactaagaatacaaaaattagctgggcatcgtggcatccacctgtaatcccagctactagggagactggggcaggagaatcgcttgaacccaggaggtggaggtgcagtgagtcgagatctcgccattgtactccagcctgggcaacaagagtgaaactctgtttcaaaaaagaaaaagaaaattgacttaaacactagtaattcttgttaactttaaagcagagtcctgaatatggctacagagggaacatcttctttagctcttgtcaattctggaatgtttctcatttgtgttatttctttggagatattagttgttctagagaaagaaggagatagcattcactcctgcttctgagtgtttgtgtctgcgtgtgtatctgtgtgtttttgggaatacttggaagaaatcaatacatagtaattgtttattgtttatagtagaattcaagatgaatttgatggtagattgaattttaacaacttttacctagcaatattctttgccagtattgaggtagagcccatacctttactaaacagtacaactgcaactgctacaactgcagttactttgggttaaaactaaacaagscacttcacatattttgcctgtaaacagtgcaacattccagggagatataaagctttgggagattaagttacagagtaccacaactataaagagctgagattagatttgaacgcagttttatatgacactgaagcccatgtgctttcatctgaaaatgcttcttattctaagagtgggaacaaagggaatatgtcaaaagaaaattttgcttttcatatacattttgtggcctaagtagagagactctttgctcaacaaaaaatttgtatatcaaagtttggaagttgcttctgaaatactagatgctttgacagaaactactgtcctcattagcttctcagtaggcattactcgggcagagttcctgccgggaagtagttggatcttctttcccatacactctccatgaaataacccagcggccagcacccaactggagaccacccaaaaggccaagcagaagwgtaatggcctgggattctagtgctgctatgcagctgaattattttgtgcaaatcataaacctccagttccttcatcagtaagttggagatgatactactgacctgcccagtgtacctttcagggtaacattagacaggtcatatgtagaaagccaagatttaaaaaaaatatgtatcattaacttaccaacaagtgtttgccaagtagatattatgtgatgggcattgttggagatggaagatacagtggtgagtaaaacagatgaagtccttgtcctcataaagttattgttctgttgtaggatttatccagttgatacattacagcataatgttttcaaggttggggtaagaaagaacagggcactaaagagaggccttaaatcaaatctcagaggaggttgaaatggcagcaaatgataataggcacttgtaaggcaaaggagaaagtatgcaagaaaaggaaagatcttgggtagagattttgtggtaagatttaagagcatattattgtgggagtgtatgttttaaaaaaacaaaaaagaggagagattttcatgtggctctcaagacagcctgctcatctgtgggaatctgaatcaggaagctgaggagggaaaaggaacacaaactccagtctctacgacccaaatttggaatacaaaaagaatgagtgctggggaagtccacaccacttaaaaagattggcctcacagtattttgccaagtgtggtatctggaggagaaccttggcatgtaccaaaactgccagagacactattgtaaacagggaactggggtgtggaatgaaggctcggtctggaattccatgacaggcattctcagcctgggaagaccaggttatactagatccacgtgaagaartcccagaaacatattgcagaagcagaggcttgcaggctagtctccagggttgctggtctcgagataaagatctcaatgtgtgccgagaacaagattcaagtacattttgtggcctgagtagagagactttttgctcaacaaaaatgcagtgggtggctcccccaagatgtcataaagactaggagagtcaggctatgactctgaayctgtgattctttgrtactttgataaactgaaaaaataaaatctaaattttgattctggaccttaaaatctgtgtttcttactgcagagattatttccccctctttcttagatgaaactgttaagctccaggaagacccaagtagatttttttgggtcattggggaccttggttggatttttaggaggctgtaaaaaccactgtattttttccccttattatgctatttttgctcagtaataattgagaaaaaggcagtcagtgatacttttgtgttccagctgtgtgccaaaacttgcagttatgacaatagcttggaagctatggaactcaaatttctttcttttcttttcttttttttctgagacagagtcttgcactgttgcccaggctggagtgcagtcgcacgatcttggctcactgcatcctctgcctcccaggttcaagcagttctgccccagcctcccaagtagctgggattacaggcgtgtgctaccatgcctggctaatttttgtattttcagtagagatggggtttcaccatgttggccaggctggctcaaactcctgacctcaagtgatctgcccacctcagcctcccaaagtgctaggcttacaggcgtgagccactatgcctggccagaacccaaatttctgaagcaagttgaatctatatatgtagagcagtagagtgagtagagatggagaagctttattgaggaaacctttcaggagaaaatgaatctttttttttttttttttttaagagacggagcctcgctctgtcacctaggctggagtgcagtggcatgaccttggctaactgcatcctccacatcctgggttcaagcgattctcctgtctcagactccctagtagctgggattacaggtgcgcaccaccgtgcctggttaatttttgtatttttagtagagacagggttttgccatgttggccagctagtcttgaactcctgaccttaagcaatccacccgcctttgcctcccaaagtgttgtgattccaggcatgatccaccatgcccggcagagaaaatgaatcttaagatatctctgcccctcttgggcccctcgccctttcttcttcatgtctcttccatgagggctgaatatttgtcatacacttttgagcgtgaaaagggacactattaacaattataccagggcaacaggcataaaactgtaacatggggccagcctggtttaacttcatatgctccttaaaggactttattgatgccaccttcactccatttccagtattcatcatcctctgcattcccatcacactctgtaactatctttaatatggtgcagaccacatggcatctgttatttgtgctatgtttgtctctccctttgacttgtgagctctttgagggtaagagctctatcttaatcatctttgcccagtacctccattctacagcgcaaggtctggcacaaccaaggcgctcaatgtttgatgatgaagaataatggatacatttggaaggagataggtgacagacttggcgaagactggagaagttatttctggtagagagaaaggaaatagcatatatgatagtgtaatgttgctaacaacaattgtgaagagagtgttgcaaatacattagcctttgtggaatagagtgttacgttgaatgcttagaaatgaggaggatttagaggaagagccagagttagtagagactatagattgtccaagattyttgtttggtggttgctctagggaggggtattgcgtatgggaacatggctgctattttattgtcccctaatggaatcgattagatgccaagcttgaatttgagtttggaggactgtgtgtggtaaccatgaaaacttaaatgatgaaaagagaatagcttctcaaagaattttgatacttctgcttccagctgaaaccaggaaattcagaggcagcagaaatgaaaacaaggaaaacattaatggaaattttgaacctagaaaaggtttggtttgagttttgaaggaaagtctgggttgttttactgcccctaagtactactgttacgatttgctggtgttttatttgtttattatatttcatttatttaatattgtcagattatgttctaatccttaggggtgggtccccaaatttggcagcttaactaaggcttctacatttactgcaatgctggagcagccgaactacccagaacaggcttgtgttgtaatagtgtgggccgctttgtctcaaatccrcagttctatctgggagggtcttgcaaagtattctacgaagacttttctccattacttgcatagaatggtaagactttaattaaagcaacatgtatacattatttaataagtgtttttcagaactgattttctctagtagaaaaaatagtacaagaatttatttttttttaaatttatcacttaaggaattgtgaattgcctaagcctcagtctctaaatattttggtctgtagggccccacatttccaagaatctgtggaagttttgactttagcctatccaaagtgggcagatcaagctccaggtatttattgcagagtgtggaatgaagattttcatactgaactcccatctcttcttccgcaaagagtaaagcttcagacctttttttttcctaagaagagagctttcctttggaggtctgaatctgcactgggggtcttcattgagttctttggtaactgatgaacttccctcttctgtacttagaagaccctcttgaatgcccacttattttatctatacatgttcctttaagttcttacctaaagacttttcctctgtatgacaaagctgcttactttaaatgctcattactactcactttttatgctgaaggaatgcatatttgagttgctgtatgcatataatgatcaatgtgtgccttcttcttaattaaatcattggtgtacctgataagcctcttcaggggtcaaaataattaattctacagaaatccaatcctattggctttccattcagctgaatcatttcaaaatttattacataatgtttcctttatatacaaattgtaaattctttacaactaaaaaaagcattctgtaaatacagcatttacattatggttttgataactgtaaagcttgacccatggttaggtgatcagatcaaccacaaaagtgttaggaaaactagcttgattaaattaaggagaaggtgctatattaataatargtaagctagccattttaggtaacttgactcttccaayatttctttaacatttgatgtaaaatttaatatgcacctaacacagtttattttttttcttttttagagagacacctcctctatgggcgacctgcagtgctttatcggactagatatgatatcttatatcacastgactttgaaagtggttatagtgaaatattcctaatgccactctggacatcatatactgtttccaaacaggtcattgagaaaattggattttatattttttattttattacattcctcatgttaatacaatgattccttgcttracagaattttgtcttagaaaatattttattttttcttaatgacagaaatcctatgttggatttattgtaagatattttgaattagcctttattcaatgttctggtaattccatgggaatatgttaaactttgaaggtagatcactaattcttttattttcttttactctgcctaagtcattgcccaatagttacagaaactgccaaggtttgtttatttattttaatagactttatattttaagagcacattttatttctcagcaagattgagtgtaaagtgcagagttcccacatactcacccaccccccttcaacctcccccactatcagcatctgttttttttttttttctaatgttttgagaccgagtcttgctctgtctcccaggctggagtgcagtggcatgatctcagctcactgcaacctctgcctcctgggttcaagtgattctcctgcctcagcctcccgagtagctggaattagagatgcacgccaccacacctggctaatttttgtatttttagtagagatggagttttgccatgttggtcaggctggtctcgaactcctgacctcaggtgatctgcctgcctcggcctcccaaagtgctgggattacaggcatgagccaccacgcctggccctgttgttttttaacaaaagttttatgttgggggtttcagttttgatgaagatgagataaataggtatatatcacaaattagaaaatgttatttggcagttgaggcatgtttaaaattttttaatacaaaggaggagaacacttctactgccccaaatacagtttattttgatttgtactgtgtacacatacgtatgttcttgtacattctacacacacacacacacacacacacacacacacagataaatagtctatttagaggagatacatctatattgtttstaagagtgttattttataagttatcttcaatgagattctatttattatttcaacagtgggatttctgctttatgttctgctttctatattgtttttcttaagactttgataaagagagttatgttgattaaaaaaagtttgaaaacttgtggcttactgtacttaaaactaaggacttttaaaaagaagtcagactatcaaagataaaaaatttaaaaaaggagtcagactatcaatcagaatacaagcataggagaagccagaggggttttgatttcagccgttcgtaacagagccayggcattgctgagtgcctctgactcccgtgcaggctgaggtttccagcgttcctgaccatctgaccagttgcgtccggcctgatgtccgtgtttctccgagtttcagtcagaactgtttggcctacaaaaatgataagcagatgtcctacggattcctctttcctccttgtaagttaagaatatcaagatctgatgccttcagagggatgtcacattgtgcaatcttggtatttggaatttcagtggcttgggttttcttcaagagagggtgctcagaagattatctaaatgaatttttatgggatccttccaaaatcagccaaaaagtgactagctttcaaaaaaatctaattctccaggrgaattctaatgtgcaagggaatcttctgtgtcccgccttacattattaaatgagaatctgaaaaggaaacagtgaatcattaagacactagtcgtttatgtaatactatagaggggatctcttaagattgcttgaggccaggcatgagccaccattgtaatcccaaagtaattccagcactttgggaggccaagatgggagggttgcttgagtccaggagttcgagatgagcctggacaacatagcaagaccttgtctctaaaaaaattaaaaaattagctgagctggtggcacacgccagtagtccctgatactctggaggctgaggtgggaggatcccttaaatctgggagattgaggctacagtgggctgtgatcaggccactgcacttcaccctgggtgacagagcaagattccatatttaaaaaaaaaaatctgaagcccttaaaccatctctcattaccttgatgatttttttttaagtctaaatggcactgatgaaatcaaggagttattttacataatgttggtagactcaagaagtagacagtaagaaaaaaacattgtaaatggctcttgggagagagctattgagtgaagaagagactgagtgggaggggagtaaggacatgttgtataamgcagttaggagtaggaataaaagagtagattcatttacttcatgttgtttggaccatttaagaaaattctacccccctctccctttttttttttaactgatatagattttggtaagcaacgtatactatttgttttcctaatgtttagatctgagctcttcaccagaggctaaatatgatgcattccttgtaaccaatatggttccaatgtatcctgctttcaaacgtaagtccaatatttacctaatacactgttatttatgaaaataaacatttctaaatttaccccttaccttttctacctctgttaattttaataagaatacttttcatgtgtttaacctttataatttttgaggatctttcatgtaaactttctacattgatgtaaactttgatttcatgtaaactttctacattgatccaaaatttgaatctgtgaggaaggttggctggtagtttatccccggtttataattaagaaattgatatcacagaaagtgaccacaggtcatgcatggtagaaactgaactaacccaagtttgtgtttttcttctaatatggttgttatttttatttcaatacttattatcttaatggttaaaaagggtcttcactatattttgaaagccacttgatatttaacagcatctatatttatttgttgagcattgcagtaaaagccagtagcacctcttcctcttggggtgataacattttctgaatgttggccctgaaacccagcaagagccgaaaggaccttctgaatcatcagagtgtttatttcagatgattttagtcctgtaccaattattttagtttctttgaacatttgtaatttctttgtacctgacataaatatttgtggatgctggtgaagtcaagaattgtataggcacaatgagctcgggcacaaaaagccaagttcctggagtgtgaccacaggctgtgtgatcatagaaatgtcattaaatctctcatttgtgaaattaagagatatgattgcatgacctctaaggtttatatggatttctgacttaattatccaatgtcgaaagcactgcattttttgtttctgttaactattcatctatgtctccatcctcattcatccatccatccccctgtccacccatccatccttttatctatccatgtgttcaaagatagagtaagcattatgaagtagcttttaccacctttcagtacatttgtagtgaacagaacttaaatcgttatgggaaaggtaggaaaaggaagcacctctatgtgcttcaacttgatggaggaggttcaggctgtgttatgtaactctcagggctgaaagggagtctcaaaataggaatgggcgattgtggagtgtcagctacagtggcgggcctccgcagcttaacattggtgaaaagggccacacggtttagagaaaaaaatgtttatttgatgtcctagttagtaaacgaaggtttattcaaagagaatttattgcttatgagtgaaaaattaaagtatgcttttaaaaagatttcttggtttgttctcagacccaactgagaagcatttcagaaactcacatagttacatttatcacaatattacatagaatgcagcttcatttaatttctgcaaatcagggttctctggatttctttattctttattgatgtgtttttttgaccaaatggtaatcaaggcaacacacagtaccaccctgaggctggtgtggagaaggcctttcatagagagcttgctgttctccacgaggggggtggttttttcacatgccacatttctgcaggcctggccttttgactgttctcattgtttctttccttctcttcctctccattttttcttaatgcttaagttaacgtttgaactcctttcttactgtctggcttctttcttgactgcaaataattatctaaggtattttggctcttgtgggctgctctgccattcagagtttcagaaggcaggaagagcaattgaagcagtatgagaagcatggccaggtgctttttaataaggggagggaagaggggttaacagccagaaccgcatgacacccatgttgaagacagcatggcgaattcgatctaatatttcagaaccaacccattgcttgcctatcctgtctccttctgttattctcttgtttttctccatttccattctgcccctctggttggccattatggaaattagaagcaggaggataaggcagttctctgcaggggatgacagtgaaagtgagaaagaattatagaggagaaagcagacatgcacagatccaggaatgtttttcaaacgaaggaaagagcaagtgcaaaagcttagcctgaaataagttaggggaaaagtcaggggacaggaagaaagtcttgcgagtgatagggaaaggggtaggaagtaaagtcacagaggtaggcaaagaccatggtggggagttgggatttcactctaattacaatgaaaaataatctggagtgttggaaatgggtggtgtgtgtgtgtgtgtgcatgtgcgtgcaagagaaagatacagtctgacttatggtgtaaaaggctccgtctggctacgatatgggggagtgggctacaaggtacaagggaagtaagcatttcacagggaacccagggaatagtcttttgtggtgtgatagctcactcagagaggatggtaagttagaccaggatagagcagtgaaaagatgagaggtggtcaaatttgggataattgggatgtactttggtgatagcactgacaggaattgttcacatgtgtctatagctaggagagaaagcaaggatgactcttaggcttttggcccaaacacctgggtgagtgccagagccattgattatgatggagaaggcgagggttggggcaggattaggaaggaacattaaaattcttttgcttgacatgaatattaggtattccagtgcattaggaggtaggtggttggataacatgtctggatctccaggaaaggtcaggggtaaagcttaaacctgggaactagcatattgatgagatatgaaggacgagaagaaagagtaaggccttattttcattactctgaaacaccatacttcctcttttgcacattctgttccctctgcctggcgtgttctgcctgggaaacaccacctacttatccatgcttcagatctcagcttgggaggatcctttcctgacttttgaactacgttaaactcccctaccattgtttcatagctctacactgttccctttgctggtttgtaaatgacacacacactgrtaatgccatagaattgattcatctcatgaatcacgacagctctcttgtctcttggcttgtgagatttggctcrtagcatgcatcctagagagaatttggctagagtaaggagttttcttcatgaataattgatttttggatttttgtctttgcacaggggtctggaattatttccaaagggtattggtgaagaaatatgcttyggaaagaaatggagttaacgtgataagtggaccaatcttcgactatgactatgatggcttacatgacacagaagacaaaataaaacagtaagcgtttcatttctactcagtgtgtgattyttaagtcccaagatctcactcaagaagtttttcaaatattcatatactagagaagagatgacaccccttaagttttttgaatttttcaatatatatatatatttttttttttgagacggcgtcttgctctgttgcccaggctggactgcagtgatgtgatctcggctcactgcaacctccgcctcctgggttcaagtgattctcctgcttcagcctcctgagtaactgggattacaggcatgcaccaccacatccagctaatttttgtatttttagcagagacggggtttcaccatgttggccaggctggtcttgaactcctgacctcaagtgttctaccctcctcggcctcccaaagttctgggattccaggtgtgagccactgtgcccagcctgaatttatcaattcttttgattaaatgggcattggtggtgggaatggaattttgggttttgtggtaaataaatgcacttttttattctatgaaaaaaatgtattaaaggatttaattttgtttagtcatttcttcaacagctcttcaatgggaagatgaccattcccacttatcttcattatttgggtgggacttaagaatcccttagattttctgagtcagtacctctcagtagcaaagtgcctatggacttggattgaatctggttgtctctgtctctttggtgctgttgggcatataaaagccattatctgtgctcataagggaccccacagtctagtggagaaagcaagatttagagtgattgggatgtattttcattgtataaaattaaataacaacattctgaatttgtcaacaaatttgttgacaaattcagaatgttgttatttaattttatacaagcatgaaacaatcagcagcccagagtataagagggtttaattgtgatttagagataattacagaataaattgctattttataaatacagataaataagatagaaattatcttacttcttttccagtcattctgaagagaaattttgtgtaaattgcacatttattttattgctgatcactgttagccaaaattaaattagtagttaaatcgtaattttaatatttggaaaatgaataaaattaagataatagaaaaccaggcaaggaattatgaatttctgtactgatctctacaggaaaatattttttatacctctaggtccatcattagcactcggtccttagtacttcctttggcaaatgagttctttgtatcaagttctgcatctcattgtagcttgaaagggtcattattctcctggctctaatgtctcttgcccctgtccattttatacaactctaggaaagttatcttcctgaaacatggaactaataatgaatgacactccctagcacaaaaacctttaatggagcattactacctaaataataatgccccagtccatatcctggcactcagaacccaccataatttggcttttattgacgcttccagcctttcatttctactgcattggtctattcaccattacctgtctccaattcttagatcaatccattttctttgcctggaatatctttcttactctgccaggttgaggagtgaggggattccaggcaaagaaaacattattttcaaagacatagaagtgggctagtgcttagaagtgaaaaatgattcaattgaatggggattaattttagtgacttaggcaatattcattgatcaccatttawaaaagaaagcttcaacatcaactcatcaactgtgacttcgttttaccttcctgtttcaggtacgtggaaggcagttccattcctgttccaactcactactacagcatcatcaccagctgtctggatttyactcagcctgccgacaagtgtgacggccctctctctgtgtcctycttcatcctgcctcaccggcctgacaaygaggagagctgcaatgtgagtttacagagagagtcctttaggatttgcttccatagttcaccttcgtttcttactttatatttcsatcattgaactagaacatacttattataaagcattcaccctaaacagaaaaaagaaaggaaccaaacagaactttgcttaacatgtaggaattttgccttctaatgactctttatttttcaatatatgtgtgcatttaacataattctatcaatgtgtacaattttgagaaataaatgtccaaatgtttttcattttgcaaaagaaagtggagaatgacaaaattttataaaaaagtaggaactagcaaaattttgataattgttgaagcttggtaagaggtcatggaattttatttctcacttcacttttctggatgtttaaaaatttccatattaaaaaacttttttcttttttagctctgtcgcccaggctggagtgcagtggtttgatcttggctcactgcaaccttcacctcctgcattcaagtgattctcctgcctcagcctcccgagtagctgggattgtaggcgggcaccaccatgcccagctaatttttgtatttttagtagagatggggtttcaccatgttggtcaggctggtcttgaactcctgacctcaagtgatccacctgccttggcttcccaaagtgctgggattataggcatgagccattgtgcgtggcccataatgaaaacttttttttttttgaggcggagtctcactctgtcacctaggctggagtgcagtggtgtgatcttggctcactgcaagctccgcctcccgggctcacgccattctcctgcctcagcctcccgagtagctgggactataggcgcccaccaccacgcacagctaatttttgtatttttagtagagacrgggttccaccgtgttagccaggatggtctcaatctcctgacctcgtgatccrcccaccttggcctcccaaagtgctgggattacaggcgtgagccactgcacccagccatgaaaactttttaatacacacacatacacacacacacacaaacacacacacacacacacacacacacaaagcaagagcaagcgagaaagaaatctataccttactaatcaggtttgctactagttatgatggaggtgtagcagtcactgttttctcagatagcacagatgactcctgattcactcatcctgtggggagacagctaggatgcaggatggcatcatgaaaacactagggaggaagacaggagccatgctatatgctcctggccctgtactaacttgacactcagggacaratggaaaaaccttcaggtccttttaatttgatggaaagtttgtgctcaaaggttgattttagaagtaatggtctatgcttttgtttcacatgacagaaggagtagagatgtaatctacagaagataatctttagtcaacaagtactactcaaattcctaagttgtataagctactctaggagaaacaagagtgtgttagayagagtcactattcctaggcagcccacagagtgggtcaacaaataaaacaggtatggaaattgcaacactgaaaggcaaggagccacaagaatagcttcaatagagatgatcagctttgtgggcaagatagtttttgatctgttgacttcaattatgggtgaagattgaggctatgaatgtagaagaaaattagaaagtttaaatatatcccagaaagtgaattaagttttgccagaatattagaaatgagggcaaatagtgggagaaaagattttaaaagttgattggaatcaaatttttaaaaagtagtagtagtaatagtagctatagtagatatcatagcaggagcagtagtagtagttgttaccatttattgagtacatgttgtgatccgattatgtgtaggtcctctacatatattatttctaatcatataaccacagtatgaggcaaatatatatatatatgatctctcccctgcctttttgttaactgttgagaaatttatagctactaaggggaaagtatgttgtgtggttacttggttagtcagcagaagagcagagctttagatttaaggcctctgactccamgagcccatcctctttccaatttatcagacttccatagtagaaccttgggaatttaggaattttttcgtacgttttaggcattaggtacccaaggaaaatgtttagttggaagagcaacrtttttggctctgctttaggaagataaatttgaaatggaggagactgaacattgtgctcaaagggcttaggcaagattcacaggagtgaggcaagagagaacttgaactggggttgtggtcttggagatctaaaaggaaggatggaagacaacaatattatacttgaaggatccatagggttttataaatgatgggaatgggtggtagagaaatgtggaaactgcaagtgagagacaagctgttatcaacttactggcttggccctctcaattttggttgtttacaaccacaaaagccccaggtggatgtaatgcctccgtataacatggtatacgttctctgagcttcagtcttattagaaacttgtagggaggtgaaattcttgcaaaacattaaactgttgtattatgggataaaaataaaaattgccatacagttctaagatgaaaagactacaaaggtatttcatatacatagtaggccatttaaggtgtacctagattcctggggaatagatgttcaagttcggtcattagaggaatttggtgatggggagttttaaaaatactgctctaaacttggtacaaaggctgttctgtaatcgatctaaattttatatctgataaatgaaatccactgaagtccttacaggttttcctctccctactggttcctgactctgcacagagtctggaggcacttcttgtagagttcgtggccagcatgcttctcgttgaagggtcacctgttcatgtagaagctgtccttgctgtgaattttaccttaaaacttctgggacttgaattcacaaacctggggagaaagtcagggagaaaagacaggtgaagaatcaatgtccataatgaggaagacagcaagcaagttcatggattgtgcttttgtttgcattaatattctaagtgctttatttttaaagtctttcctgtcctccctaccttgctgttcatgaacttttatctgaattgtcttagttttgcatcttgcagcacagtcttcatcagcgaatgcttctgtggattgccagcgaacatcaaggcagaagatatttccttcacatgccacatagctagtatttcctaatgatgaattatagaacagatttcagagtgtgagaaccggaagagactgcctctccaatgaaattggcaaatcacttcccaaggaaagaaatagcaaaagacagatgtttttgcagaattcttataatcccagctagccatcatttaaattaggaaaaaccttttcacccctgtccacacattcaaaatgactgcatttacaaagaaaaaaattggactgactgaccactgaaaaatcaaacaaatgagctgaatatgaaaattctctcaaaatacaggctcatgcttgccctgcttactctgagggggtcctgacccatctggagacctcctacttcgttaattatagggtcacactgaggactggtcagtaccattgtgggtagagttatatttaggtctttcctttcctgtgaatcgcagagatcttggttaggttgggttaggagggtgggacatgaaggttaaaattcttacctccccagcctgcaaagcaatttcttcccctttcttcattttgcctgagatggccaggcatcagtttcctgaaccaacaccctcccgaacatatttagcactggcacaagctgctgcagttccctgtccaggtttgtgtgggttggagctttccgagaragcccattgcaggttcttgggctttggtggatagttcactgagaccactggtggtaaagagttggatgagggcatgtctgaatattcccagacctaggacatgcagccacccttcaacttgtagaagggctcttggaagccattgcaattccagaggcatttgtgaatggaattacttgcaaaggtcctgctcaatgtctactaatgaaagtagacactgctccatattcacagggctctcagatctcactctttccctcaacttcccacaaaaatgaaagaagctatttttgagatgcaaagaactgcttcccctgaattaccttttagtttcaagttagacatgaaataagttgtttgatgcaggacatctgaatgtctttcatctgcaacttgtgtcagtggggcaatttttggcaagcagctgaggcagagattcactttcttttttccgtgtttccttgctttacctttccccccgcttcttccctcctctcctccctaacctcccagggagctgcagaagtaagcattattatccttgtgaaccaaggaagaaactgaggcctcaaaagtcaagtagcttgaccaaggtctcatagccaagaagtagtacagcctcatttccaactctggcctgttgggccctagagtgccagatgtgtcaactgagtggtttcgagttgacctcatttttcaaatagcaatttatgcattctagtagatgacgtggttgatgcagcagtttcttttgaaaaactaggaatgcacacacatcatttcgtgcattaggcttaagttcttcactttccttgggaagcagaagcatattccaagttacttgtactctgtgctcaatattgcaatttgacagcttggaaaagaaacaaattactgaattctctagggcctttggttttcctaattttgatttatgttctgagaacctattgagtcaaatgccctctgacaccacatgtctcgtttatttggtacagttaattgctgttgaaaatgtttacagccaagggcaggtatttgtggcacattacccataggaatgcggtagagtggcagggaggccaggaaggatcaacatgcgttggctctgtgtgcaagagtgcacagaggtcatttgtggacttggagtaaactgaccatttggagaaactcctctggaaaattctgattctgatttkgttctgtttccattgcagagctcagaggacgaatcaaaatgggtagaagaactcatgaagatgcacacagctmgggtgcgtgacattgaacatctcaccagcctggacttcttccgaaagaccagcygcagctacccagaaatcctgacactcaagacatacctgcatacatatgagagcgagatttaactttctgagcatmtgcagtacagtcttatcaactggttgtatatttttatattgtttttgtatttattaatttgaaaccaggacrttaaaaatgttagtattttaatcctgtaccaaatctgacatattatgcctgaatgactccactgtttttctctaatgcttgatttaggtagccttgtgttctgagtagagcttgtaataaatactgcagcttgagtttttagtggaagcttctaaatggtgctgcagatttgatatttgcattgaggaaatattaattttccaatgcacagttgccacatttagtcctgtactgtatggaaacactgattttgtaaagttgcctttatttgctgttaactgttaactatgacagatatatttaagccttataaaccaatcttaaacataataaatcacacattcagttttttctggttttatttggcttttatttcacttataaattagagggtttgtttcaggtgtattcatgcgtgtaaggaacacatgttttgtactaggcccttttcctagttgcttatatgacatttaaccacagtggcctggatgagatggtttaggtacatatctataggaaatcagaagggcagagggaaagaggaattagaagcacttctgaatacaatctctcaatgtatctcttttacaaatattttgaagtttggaaaaatattttgaagttttgaccaagttggttgaaaactgtaagtgttagattcaacttaaactgccttgaacaaatattctatacaaggtattgacctaagaaccctggaggatataaagagaaataagacagtgggatgagatatggatataaacatgtaattagccaatccaggtagagaataacaaatgccaagtaaaaagtattagtaacaacacaataggacagaaaggtctgaatagtaatatgtgggggtaattttaaatggacatagttatggctttaaatactaataatgcatggagtgaagaagtcattaaaaaattttcagtctttcaaattgtgacatagagaaagactcagaatagtgttgttatatctctaacagttgttaatctcccttaaataaagaaaacaaggtctggcgcagtggctcgtgcctgtaatcccagcactttgggacactaaggcaggcagattcacttgaggtcagtagttcaagaccagcctggccaacatggtgaaactccatctctactaaaaacacacacacacacacacacacacacacacacacacacacacacaaaattcctgcatggtggcacatgcctgtaatcccagctacttgggagggtgaggcaggggaatcgcttgaacccgggaggcagaggttgcagtgagccaagataggcccactgcactccagcctgggtgacacagtgggacaccatctcaaaaaaagaaaaaacaagcaaacaaaaaaatcagaagaaaatagcctattgttttgttttatttatttttaattgttcccttttatggtcagtgaaatgggttttaatttctataaattttcctttaaaaatacattaagaagaaagacattatgtcaaaaataatttacatcaaaagtagcacagtaaatttgatggtattggggatatgtgaaaaattgggaaggcggtaagggaaaaactgatgtcctggaaacagggctgtaggactacactggaagaagtgatcatggtgataccaatgtggccgtatttatagagctttcactatgttccaggcatgcctctggcacttcctgtggtttgtctttgaatgctgaaaaagtgggaagctcagagaagatttcatggaaagaggaagaatgaagatatgaatgaggaaggatgcattgggctttggagtttggggtagggtgaaagggtggtagaaatgaattagaatatgattcattattcatttaatatttaacaataatttattgagcatctactatatgccaggttgagcatcccaaagctgagaatctgatatctgaaatgtttcctaatctgaaatttttcgagtgccaacacaacgcacaaagagaatgcttgttgggacattgtgggattcagatttttggatttgggatgctcaacctaggcataatgcaaatattccaaaatttgaaaaatcaaaaatccgaaacacctcctgaccaaccatttcagatagacaagggatactttccattgaggataaaacagtgaataaataaacatagttcctggcatcatagaacttgcactttaatgaaagagacccttttaaaaacctccaattatatgttatatgtgctgtgaaagaattaataaacaggtggaggagagtaacaagaaggtggaaaaggaatggcttcataggtgactttctagccaagacctaggagatgagaagagctggcctctagaaaaagagggataaaaatgaagagcatggtcaaggactggggtcgggaaagatcttaggatgtgtgagaatctgaaagaaaacagatgcgcctgaatgaaaacagatgtgcctgaatacagtggtgaggtgggttgggatcaggtcaggtctcattgaggcccaataagctccactgaggcattttgattccactctaaatgcaatgagaaataatagaaaagtctcggacagaagtgtgacgggatctgatttaaggtctcactcagtacatgaaccccatgtattaggttcgtgcacaaattaattgccgtttttgccattaaaagtgatgacaaaaatggcaattaattttgcaccaacttaataataatcacatgctatgctctagatataatgccacataaaaatacatctgaggctgggcacggtggctcacgcctgtaatcccagcactttgggaggctgaggcaggcggattacgaggtcaggagatcgagaccatcctggctaacatggtgaaaccccatctctactaaaaatacaaaaaattagccgggtgcggtggcgggcgcctgtagtcccaggtattccggaggctgaggcaggagaatggcgtgaaccccgggggcggagcttgcagtgagctgagatcgcaccactgcactccagcctgggagacagcgagactccgtctcaaaaaaaaaaaaaaaaaaaaaaaaatctgataagagaaggtccacttactaggtgctgtaattgtcttccaacagtagcattacaagagagaagggttaattttgattaaaaacaaaaataatcacgaactgtttgctaagctagattcctctatcacctcaggttgaactcttctccaaataggttatacctgaggctcctggggaaaccggttgcaaatttagttgagtacctctgctctatttttatctttaggataagtcttttttttcttaaaaataaactccatacccgaagaggacatcaaccactgtatattttcaggtgagtggctttgctgataaacacgtcattaattgtggggttatttatgaaaatccctgaatggacagggactctattaaaatgaggtctagaaggctattttaagctgctttttttttttttttttttaatattgagactttggtccattcatgctttcattgagcaagttgcaaaccactcaccagcatggtggtcctgttccagtggtttaccccattacagtgagttcctttaagggaggcagtttctgaagccatccacatagtttcccaagggtgaaaacatcctgagttgtttataagagggccgatttaaaaaaaaaaaattatttgaacaaaagcagtgtttcctgccaactgggattgcataactctgcccaacagccacagccccaaaacttcctgtgcccattattcctcgtggtggttgggaagagggtggctgcagatgagtccagatgattcctcttacttcagctctccctcactatccctctgctgagtcaggaccaggccgccttgtgggtgggaagtgttaaaggcaatgggaattaccccaaggctttgaggagagggatgggatgggacaatgaagaacatgactgagatgttcaagtctgtaggctgrggcgaagagcacactgctggaggtccagcctagagtggaagtgggtcctgttgggctgcatttctaggaagtacatgcctcctcaacccctcttggcaggggtgtccagttctggctggaaggtagaagtgaaaaagatgagccctggctgctgattatttttttcttttagactgagtctcgctctgttgcccaggtcggagtgcagtggcatgatttcggctcacggcaacctccgcctcccaggttcaagtgtttctcctgcctcagcctcccgagtagctaggattacaggcgcccgtcaccatgcccagctaattttttgtatttttagtagagacgcggtttcaccgtattagccaggatggtctctatctcctgacctcatgatccgccacctcggcctcccaaagtgctgggattacaggcgtgagccaccgcgcccagctgctgcttttttttttttttttaaacttaatcgaagaaaaactgacagaagtagactacacatacttagtatacaatttgatgcattttgacatctatatacacccctgaaacaatcagtgcaatcgagatagtgaacacattcatggcacctgaaagtccctcctgttcccgagtaaactcctcatacccaccacataccatccccctcccccaattcccaagccctgatttgctttctgtcactatagattagttggtatagagttttactctaatggaatagtacagtatacacttcttgttggacttctttcactcagcataattcttctgagacttattgaaattgtggcatgtatcagtagttaatctcttttaaattgctgagtagtattccattgcatggatataccaatgtttgtttattcatctgtggatggacagttatttccatctgttgatggacagtttttaactattacaaacaaaactaggaacagtgtgtataagtctttgtatggacatacgctttcatttctctttcgtaaataccttggtatgggatggcttgatcatatggtaggtaggtatgtatttagctttttaaataatttccaatgtgttttccaaagtggtggctgtattttatattcctgccagcagtatatcagagttccacttagttcacatcgttgtcaacttttagaatggtagccttaattttagctattctaataggtgaattagtggtacctcactgtggttttatctgcatttccctagtgactactgatgttaagtgtcttttcatgtgatgattttccactcatgtattttatttagtaagtgtctgtccaaatattttgctcacttaaaaaattgagtcatttccttgtgatcaagtcttaaaaagtctttatatattctagattcaagtccctgaaaaatacatggcaaagattttctcccagtctgagacttgtgtttttgttctctgcagtgtcttttgaagattagagttttaaccaattttgatgaaggccaatttaccaatttgttcttttatagattatacatttagtgtagtgtctaagaaatctgcttagcttggggtcataaaatttttctcctttgttttattctagatcctttaaacttttaggttttacctttaggtttatgattcatttttgtgttaattttgtgtgtggtacaaggtatgcatataaactctctttttcgcatatgaatatccattttttcagcaccctttttaaaaaaggctatatttttccatgtatctttttttacctttgtcataaatcagttgtgcaggtaggtgtgggtttatttttaggccctttattctgttttattgatctatttgacttattttataccaacaccacactgttttaattactataactttaaacattttaaaagtcaggtagtattagctcttcaactttgttcttttttggtaattttctttattgtggatcctttgcatttccatatgaagtctagaaccctaattaacttttagaaaagtgcctactgggattttgattggaattttgttgaatctatatattgatttagaattgacattttaattctaaagaggatcctctttacctatgaacaaagcatatttttcactttttgaggtcagcttttgtatgcctgaaattttttatttcacttataacttttaaagatatttttagaggataaatgcttttaggttgacaattatttctttcagtgcttcaaatatattgctccaatttttgatggggttgtttgtttttttcttgtaaatttgtttgagttcattgtagattctgaatattagccctttgtcagatgagtaggttgtgaaaattttctcc

SEQ ID NO: 94569 - DNA, 44735 bp, Homo sapiens
ctattctttatcttttcccatttccagttaaaagcccaaatatatatgtgtgtgtgtatatatatatatacacacacacacacatacagtgtcttcactaccttagaagggttattatttatttctggatcataacctccacacatgaatagcatagtacacattccaaataaacaacatagatccctttctaagcaagtcaaccattaacatagaaatatatatttttaaaaaggttaaaaaaatctatcttatgcagctgaatcaaatgtgaagtcttggatgtttaaagtaaaaatactttagtgatttatcaagacatgaaactatcaagtcatctattttgaactcctatttagaggcagccttcatttaatctattgtaaatctcatgacaaacacttaacagagtagttatggaattagaaaacctcattaagtgtttaccttttatttaaacagaaagctgacaggtttcattcctgatggaaatagagaatgtaacaggaattacttatgagtaatagtgaattattttccccaaatttaatagcagataataattcattcgtagttaaaatttccttataaatttagttaaaatatatatttaaaaactcacatttccaatagccagtagtgctttgtcaaaaaagagaatcattccaaagaacaggaaaaacactccaaatcctgttaatcccattccaatttctgcaatataaggtatatggttaagggtagagaaaaattaaagtcacattaacatccctgtaaactaagaaaattttccagttttcctttcataggtataagaaaacaggtacccaacattgcaggttaacttcataatgacatttatttagctcttataacaaattaattatcagcaaattatttcaaaatttaaaacattaatgaaaatttctaagccttatatgggagatagcttttctcagacatagctataataaaaaagataaatcgggattctaaacctttggttttaatatgtaatttgtttttttcctcctgaaaagctctctcgcatcagacataaatgtataggtttccttaattacttatctcctttcacattctataattattatttaaatgcacaatatctgtagttctttcttcctcttaaaattgattccttctctactgcattagaaatgttatggtaggtccgcacaatcaatatcctttatccaattatatactgcttgtcacaatggcaacaagaaatatttcgaaaatcatggtaccagtattctcaaaaccaaattttcagaaggtcaggcatcacttttaatttcttgattacttattatggacttatctacaaatttacctaaactataaatctacttaaatatttggtctagagtcctaaaatcacctctccaaagtttcaaagaatactgttttacctaatattaatattctaggtttttcatgtttcattagtttcattaaaaaacaaagaattgttgatcaactgccagatgcaaggaactgttccaggtactgaatatacagtggtagacgaggtggtagacgagctttaaagtctatgtttatcttgtatataaaattaatacttttattgactgtgcattctctaggtcttatttttttagtatgaaaagtcttaacttctaaggtgacagatgtactcttctattaatgttataaagcacaattcactaagttacctccttgatcattttagttttgattctagaaaatagccattaatccgtagtttagttagaagcacaatctgcatacagatgagtcagagtagaagccaccgtatttttagaagcacaatttaaaataccctatcactgatttctgatctattgcttaacttttttgcctcagctccagaaagctaaaatctaggtcacagctacttaaaaaactcttaagtcatataaaatgttctgataacttgaaaacttttatcaactttagctttttctacattccccacctgctcaatttcctgataactagtgtcttccattgcagacaccttttgttcccaaagttagtctaaaataattcaggtacctggtctataaatacaccagttaagtgaattcaacacacattcctatgaaaatttgaggctgatactttcatgatcaaaggccttaagagaatttaccaaattaactatttggatagtggacataatttcatagaggaaaatatggacaaaagagcaagtaaaattctattaaataactatttagtagttaggattaaacatcggcagctttgttagttgaagatgactaatttctatcatttcacaaataaccttgatgattacataaaaattctgagatgtttttagaaaggaaggtatatggaaagacacctactatgtactgagaatttaccacgaattaggccttatgaagtgcttcacataccttatatataacttaatacttccaatactactggaatgcaggtataattacatctttttaaagatggaggaaattgaagtttagagagttgacttaagttgcctaaagccacacttctagataagcattcgaaccaaggtcttttgaatccaaagctcatgtgcttaaccattaatgccatacctcttcccacagaatttttattttttaggttaaaggtgtttggttacatgaaactcaaggacactggagtattctgaacttctgggggacgcatcttttaggggattcaagtttaatattagcttgttatctaacatagccaagtagaactattaaaaattaactgcggtcaaaaaggccaatctctgagtatggtttaccgtgttatgaagtgtttatacaaaaattttataatttctttaacaaaattgtgaggtaaaaggtagcactggtcctatggttcatatgtgcaaccatggacctagaggtattcagtaacttgttcttgatcatagaagcagcaaaaatgtgtgtgtgggtgctggtggtatggaggcaggtacaacagtctgtgaagtcagcattcaaccagtcttctcactccacagacaatggtcctacaactacaacatgggaaccaaaatattccactactttatccagtacagtccagcgggagacattgcccaaaacatctttgccacaactggtactggcaatgacattgccaagtagctcctgatccacactggtcaaaagtctcaaattggcctcattgtgcctttttctcacctccaggatcccccttttccctatccgtatgcattcataagccctctggctatcaaaagccttgcatagagctgccttcttcccatcggaatcatatccagtaaaacaaacttatcttccttcactcctcccacatgtttaaaaaactgtccacaagttaaaaaaaatataaaaacaatttaataaaacgaatctgtctaacataaggagcatactgtggaaattgtataaggaaagacacgcataatctaatggcaaacactgttagcattttgatatcttattcacaattttttaaaagcagcattgtctctcttaccataccctttgaaaaacagaagtcaagcaagaattcaattgaacattaactgtactggagaatgcaattatcacactaggcttttagacaatgtgatgaaatgaagatttagaggcagcatgcccctcctccgcccctctgaataagtcttgtcttttttggggcggtgaggaaagtcctagaatgccttaaaataatcatgaatttccatttattctactctgagcagtgcttggccactctctaaaaaccaaaatcccagaataatcctgacaaatcacttgaatgatggccaatccctgcagttaaacacactcacacacaaacacaatttgaaatccaaaatgcatttggttcactaatcgttttatgtttcaatccactgtttcacctaaaacatgtgacaagtgaacagcaaagagtaaaatttcattgccctcacaaaatttaatgaagtgaggagaatgcttctcagggagaatgcccatagtccaaacccactctcttgtttttataaagcaggcactcatcactatattaagtcttcaaaaatataatttctatgcacagattattctcagatctcaaataaagtttatatcaagtcttcttaggtgatagtggggtacagtgcaaaaggtttctgagccagcacacctgggatcaagttttgtttctgtcactttttctttgaccatgcactcaatttcttttgtgcctcatttaacttatgaaaggggcatgcttctgtgagccttacagggctcttataagaattatgcataatgattcacatgaaagcacatggttaactgaaagaaaatacctttatataattgccagtaattattattacactagattcctatcccctcaagactacacttttattttctttgatcagaacaggccaggccaatggaccaaagtgggcggcaaccttggggcaggtggccccaagaggcagccccagtccagcctcaggagggaagacagcctgattggggggtggcagtgtgtgtaggaggccttagaagctctgtgaagttggtctgccatgacttgaatctccacaagaagactccactttaaaatagggcattttaaataaacttctatttttcacttcaattcactgtttaagtcttaaaatattgaaaatctgagttaactggagtgaaatgaaaggcgtggcagataaagcaaagtgagacaaaaagagactcttatgaacatcaaaatatgaggtacagagcttgggcagacataaatacaaaaattattaatattaacaaaaagcagtaggaaagtggaaatattataatgaaagaaaaggaaaccgatatcaatgctagctttagagatgaaataggcctggagaactctgtggcaggcagagagcgatgctaaaataataaaacaagccacaaagcacaatatacaatactaacgaaatatatcctttaatggcacacaaagtggcttttctctactgcttgaaactttagcaggtagaaaagtgagaatgtttcaagagacttctaaaaggttgcttacagtactggcaaaaagcgaatattcaaaatgccacatttaagcgtaaggacattttcaaaaagagcctactgtaggtgacatttaaaataccgcctcccaaataaccagccagccagggacttgtagaggacccgaagtgtgtcatgcgcataaacgatcccgagagtgggccgcgggcaccacgcaaactttctcttgtggcaagcccctagaacaaagcgcccatctcactggggatgaggagatcagcgcgaccctggaatgagacagactctgggctaaagctcccctcccaacatagggcgtcccaccctgccccacagactcttctcccaggtcaggtccgccagtccaagtctagccccggcatcccgaaggcagccccttagggtsccagcagccctagctctgtctcgcaggccaccgcccccaacccagagcttcattcattgaccccggcggaggggcgagacccagccgggcgatgggtgtgcgcggctcgaggcgggggccccggagcaggtgcttactctgcgtgtccgttaaggagatcatggctgcagtggtggggacagcggcgaaagcacctcggaaagcccagggtgggaagctgagtcgggagaaatgaagccgggaaacagcccaggcgagagccgccacgtcttccggaaacacgcagccaccctcactgccgctttaagagcgcttcctattggcgaaacctgcttccaatctcaaccaataactcgtaatgttgttcggtgacgckcatggtgaccacaccccttgaccaattagagaagggagttatctgtgattggctgaacggaccgacccggaagggtggatgctctcagctggctggcgggaagattttactcccgagtagcggaaagatctgctcgaggcctgggtgctttggtgtcggagatccgagagtcggmgatcggagagtcggacacaggacagtcggacaccggacagtcaaacaccggagagttagacygggcttctcggtggggagaggctctgggataactactgttacagctttgaagggtcaagggtgtgcgctttttgtttcatccttccctttcctgctgcagggcgaggccggtctgtagcggatcacttcctttcgcccacacattggcggaggagaaaccggaaagttaatcactgccctgctctgagaactcgggcctttaggggcacgttcgcctgctgaccggtcttctgatctccccattcttttccatgcaggaggattggccaccaaagcctgtttattagcagctgccatttgttggtaaatactactggggatgcttcttccaccccctgcttcacagtagcggaagggcgggcgttattaatattaaattactattgcctctaaatgcaggtggcggggagagagaggatttagcctatggtatctcagtggcgtttcctccaacattgatgactggctgtcaccctgtaacattcttcctgtggatgcctagcttatactgctgagtgacagacctgctgtagttcaatttctggatacattttatgttgagatatcttttgctgttaaatcacatcattttgggaaggagcagtcttttaaccgcataatcaaaggagtcatttaaaatcgtgggggagaattggatatagactgtgtcttttcataagggtagaaacakcccctgctaccttagcaaacctgagccctcactacatcaaggcattttcctgggctgtgcggatacaaaggtgaagagattgaaccccagccctgctaaaggaccttacagtctatggaaggaatgttacattttcattacgtgaagagatgtttgtatagatcaagaattagaaatccttggtttactctcctatttagccttcttttaatggtgtggttattccacattctttagcaaggcaaaaaagagtcagcctatctttccggcctagtggtggcttcagaattctgtgtagaaagggcgtaaggtcagcagtctaaggataggtgttgcagaagtgacttttggagagcatcttagttttagaaaatgtccatattagagagatagaagaggtgtttttaggattatggggaatttaaagtttctactctccagccccattttccacttgtccatatgcatgcttaggttttagtcattcatagatacttagaaatcattacaaaccattttcccctccccccacctctaacttagaaaatctagcttttctgtagaataccagtttctcttttaagattgggcttataktgtaattctttaacgcaagggctcaataaaatgttagatgattaattttattatttatgttgatgtattttgcttaatctggtacatttgaatctatccaacttatttataagattgccatcctcccagttttacaggtagggaaagaggcttggaggaacagcatatgcaactttgcctaacatagtaatttagtcacatagcaattggtgctagacctgttgaatgtttgctgttttttgttacatcactttgtatcttgtggatgtttgctgagtgtcattgctactgtatttgtcatgtatacgtttatgtgactttggacacttctctgaaatctagagagttagtcgttctgagtgttgtgggttattaagctgaaatatagagttttccataaaaaattagtgtcaaaagaaccatgtggttcttatttgaaaggtcactgcaatatataatttactttctaacattttcygtgcttaggaatgacagattactgttgagtgaacatcattaatagtactatttttaaaaacttgttgtcactgttgtgcttttatttttagaaagaaatttggattattttagaaacaaatttggaaagaaaaagaatggcgtccgtttcaggttagtagcaatgattacattttcttcttccttctgttctatttctgtttgtatgatatttgaaaaagtttgttttaaaaattctgattatagaaatgatttttttcagcttttttattgaagtaaaatacacattacaaactttgccatgctaaccattattaagtgaataattcattggcattaaatgcatttagactgttgtgcagtcgtcaccactatccatctccagagctttttcatctatccagactaaaattctatactcattaatccgtaactttccattacttctcttctcctaatccctgatagccactattctactttctgtttcttgactattttaggtacctcatataaatggaatcatataacatttgtccttttgtgtctaatttttaccttatttgtgtccaaataaaggcaatagcggaatcatgcttttgcctatttctcttactgctgagtatacactgaccccttccccaaaagagcaggtacaaattatctttattcgtctttgggtgatgctcatttctcttcttgctgaatcatgtcctccttggtaatactgtaatgtatcggagagggaccaaataaaaggaaaaacccaaacttggtttatatacaaattttaaaaagcaagaaagacttatagctattacagttcttgtttttcaattggtcatgtgatcatagcttgtactttataactgccttcttcaactacccattctgtattccttggttctcagttggtaatgggtctttgcttggtggggactacttgccttagtagtttcctatatttggttattatagttttcaattaactttaatcacaaggtaagggaatactgagaggtgcactagaggatcttctgctttccagacatactcttccttatccctatagtgtagtagctatctgatttccccttaatagtcaggatcacttaccccagcaagtatagtaatcgccttctttgcctgttcatttgttggcatgaggaacccaaagtggcyaagtggcagtcaacttccagtttaatggaactattgctttttcccctggtacaagcatttctttcttggtaaccaagacctctaggccagcaagagtccgatgtttcaaggatgggaagcaaaaatttcactagcggatcactaagggtaatagaagagccactcccatttccaccgctgattcccgtgaatygtggcaatgggagaaacagcactattcactgatgtatagcatgccatatcctggaggctactagtccagcccttaaagtgctgatacccagctggcagcataattgagtctgcaaaatgccactccattattttctcaggctagctgctgcaggttgttggtgaacatagttagaccagttaatatcttgaacattagccttctgttgtgctttgtttgctgtaaatgagttctttggtcagaagtaatttggtggggaatacgatgacaatcagtaggaattccgtgaattcctggatggtggacatgatagagcactgcaggcaggtatggtaaattcatatccggagtaagcatctgtatcagtgagaacaaagtgctgcctctttcattatagacggttccaatgcrgtcactttgccatcaagcatctgtctgtccccacagagaatggtgcctccattggaactcaaggttggtatgagctgtttgcaggttgagcacttagctctggatgtagccagatgggtcttcgtgagtggcagtccatgttgcagaaggcactttgttcttgacttcgttgtgcaaggacaagtgtggtcaatgtccaggtcatcttgtctacctgattaattatgattatactttgtggaagttgtttttaatgagcattcacatgggacacaaataccttcacactctgaccattcagagaggtctatacatatatctcttcctcagacctcattgccaccagttttcctatttgctaccttccaagttgctaaccatcctgctaatcattaaccattgcttataatagtgtggatgtattcctctggcaaaatgaataactatgtggactgcttactgctgactgggagaattttccatctccaatgtttttcaggatcactctggagagatgctagagtgctttagttgttcactttcaggtagtgacaatatatcatgcagaatcttttgtaaattaggtctgcatttttttttcccttagtaacactgaatcccaccatgaggttatagctacaggttgaggaggaggaggcaaaggggagcatggtgcatgagcattcagacttcttgttcacgccttcacttagaacctgctcactttggcacataccacttccattgtgatgatggaggcctgcctgatgaattgatgggtcggatgacacctggttgatgataggcagcacaggtcacatagtaacttagtctcttgtaagacccaggagcaacccagaagttgtttctgaaagggtaatagttctctgtagataatggcaaagagctttgctctaaaatccttatcatctttgttgtgactcatctataggccaaaggtgtcatataacatctgcattcatcacaaacttacagcaccatcaaatctgttgggtcatatggctcaatggtaagagaagattgtatcatggcgttacctcttgttcgaggtcctactcaaaaccggcaagttttggggttacttggtaaattaggtgtatgttgcctcccaaatccaagtagtccattaggctctgtgctgctctcttagtaataggaggggccagatatagaaacttatccttcactttagaagagatatctcaacatgccccataccctttgactctcaccaaggtgtcaggcctctgaatttttatgggatttatcttctatcctctggcaagtgtctctctkagcagtttgtctatagtagctgctactgctgcttcttgctcagcaggtcagacaagcatgatatcatcaatgcagagagctagtgtaatgtctggtggaatgaaaagggaatcaggatccctgcagcctagattagggctagagagtagatatagctctgaggtgggagaataaagatacattgctggctcagcaaactgcttttactgtgctatactattcccctatgctataataacaggtacatgggtatggagaataaaacattcagcagatcaatagctgaagccagatgccagggcatgtgttctgtcttattaatgaaattacagctggaaccatggctgctgttggagccacagccttattaattttggcrtaatccattctcaatctccagaatccattgtcttctgcatacaccacataggtgagttgaatgcgacatggaagtcatcattaccctcatatctttcatgccgttgatgtaggcagtaatctctgcaatccctccaggaatgcagtaatatttttagtttgctgtattggttggtaaaggcagttttgctggcttccgtttgatctttcctatawtaataatccttagttactttgccaggagaccaatgggtggattctgccacttgctgaatatatctgttctcagtatacattctgaaactgaggaaataaccacacagcagattagaaggcccactgtatatcactagcagccgctggacttgaacctgctgctgccccatgccaatgagatcaccaaccctgcccttacactgactttcttaaatacagaaaatatgtctactgcttcatttctaccttttaaatctctggaaaccaaagctgcattgatcacctcacttaagtcgagtctatactctgactggtggatcaccatggcattttggttttctaagaattagcatcagttcagagctaatgtccagtagtttctgagaagtgatttctctttttctttcttttttttttggacggagtctcactctgtcacccaggstggagtacagtggtgtgatctcagctcactccaagctccgctcccgggttcacaccattctcctgcctcagcctcccaagtagctaggactacaggcgcccgccaccacgcctggctaattttttgtatttttagtagagacggggtttcaccatgttagccaggatggtctcgatctcctgatctcgtgatccacccgcctcggcctcccaaagtgctgggattacaggcgtgagccaccgtgcccggccgatttctctttttttctaatgcacagttaccctaataaacttcctggtgaagagtagtaggaagattcattacatacatttttagctgtgtggttgagtccttccccaacaggctccaacctctgccttattcaagggcctctggttctataaggtggttcaattctggaaattcgtcgaaggatggtctctctgttgtgtttctggttctgtttaccagaatcagagctttctattctgcgtgttacaaatcaagtaatctatttccgtttcagggacttcacagtcaactagtcaatccaagatcttgtcggtcagaccattctgattgctgcctcagctctgttgcccttcatggcaaccacatctactttatttttcgtcataaattcaattgccaatggttagcccccataccttggaatccatcattgtcgttgaatcaggtggtctacttggaagatgatatttcccactgtcattcctagctyacagagaacagccaggggagccccagcatccctgaagagctccgctgatgctggcgctctgctcatgactgtatttttcacagtcttggtgaaagaagtgtcctctggattctcctgggggacagcaagggagtggattatcaatctatttgatcttccactctggcactgctctctctctaagcctctgaataccttcctttagagcatacccaggaaattccagagctccagcctcactggactctatacctgttttattccatcccaattttctgacattcatctttgaggccaggtttcaggcaatgagccaagcaaattactagagccactcctggccactatctaggacattaaatccagaatttcttagtgagcccgtatcaataaacttagcttaattcgacattgtattccrtaaaccctgtttcagtacctttatgatctattcccatatacattctctaggtttctgatgtagtttggatatgtgtctcctcctaatctcatgttgaaatgtgacctccagtgttggaggtgggcctagtgggaggtgtttgggtcatggagcaggatccctcatgaatggtttggtgccctccctatggtaatgactgagttcttgctctgttagttcacatgagagctggttgtttcaaggagcctggcactgcctcttctctttcttactctatctcccactgtgtgacacacctgcccccctttgccttctgtcatgattggaagcttcctggggtcctcacaagaagcagatgccagcgctatgctccttgtatagcctacagaaccataagcaaaataaacttcttttcttttataaattacccagcctcggatacgcctttatatcaatgcaaaatggatgaacacagtttctattgatatattttggcacatgcagctcttttggtgcatatcatgtcttttgacaggttacatctttgtgttttatcctctaggacttcyggatcttaaagcactgaaagatggtagaggctgattcttaggaggcttagcagtcccatacaaggcaacaaggaccattgtggggacttcagttaggaggacattgtttcagaaaggggaggcagggtagaagagacttggcataatttagtggtttaaggtaacctgcttcgttggaatctgcccttatgttcccctccaaattkcagtctccttcccagtcagtgtgctgactttatcataaaagtccctgcaaggttgggaattcagtttgtattgaaattcagccatctgcaggatttagacttacagctatttttccaaaatattggccctgtacctatagaggataaggtttttttttaaggacaatcatagaaactttgaggtcccttaatgcagatcctacatttttcccctgagttctttgcacacttagaagcaaccagtcaaccccattattctcaccaaaacatttgtaacagcaaacactttgtcacccacagccttgccttctctagttatttttctactggtgtctatggatgatgatttaaataacttttttcactgcatgatgacatagaatagttatgttccctttatcagtggaaacagggttattaatgccttgaaatctaatcagatcagaaagccagttctatgtggcccagaaacaattcagagaacctgttaagtttctgttcttccggatcaaaattctgtattggttagggttcagtcaggtaagctgaaccattatgagtgctgtaagttttattatggggattaaaacttatgtgatcatgggagctggttaagcagctatccctgagtcagcttctggtcctgaagtcagcagtaccagcagtgagaaaggaagatgggtgtgaagtatgggagggtatggatgagctggaagctgcaaggataagttgaaattcatgaggacaaagttaggatgctggtgccctgctgaaaagctggtgcacttgtcacagaaggttggccagcaacatgaccaagaagccaaagaatctgtgggccaagttgttccaccaagatttagcaggagctgggggaactggcttctgccccacgtccacaaagtgaggcagcagtttcctaatatcatgagtgagctccagaagcacctggccataggccaaccatcccaatgtaaaactggctgctgctttatttctgccttgtaaatctcatgcagagttcacttgtggccaaacctaacccaaagtcatgtagggaagggttgatacaagggatgatggcagttggtacaataaaaaggtaccccaacatcctattttaaatcacagccataaattatatctcatgaagaagcacattaaacctgtatactgattaatgcaggcaggtatatgagaatgcaccaagaacatctttaagatttttctagcttccatcgatgtggtatcaaaaagcatctcactttttgactttaatacttagattgattagaatcatacactggggtttctttatagattagttacaaaggagataaaatgccaattccaatagtacacttgatttctcttacttgttacatcctcttgtttataattaccaactccttttaccaccaagtgagcccaaataggaataccttcataaagtaatagcaaagtaattagggaattagcttccttttgcttcaaagtctgatactttacttaaatgatttaggagattgttagaccacttctctacaacataataaaaataattatcatgtattaaatatttgtgtaccaggtactgcgtctagaactcctaatatattatctcactagctcttcataaaaatactatgaaagttagatattgtccccattttacaggaagggaaatggggatgcaggtgagtatcttgtctgaggtcactcagcaggtaaaaggaggayctgagatttaacttaggtctatatgactcaaaaacatgctcataaccattctgctatactacttcaagtttgtctgtaattgatatggcgggcaacacccagaaatcaatctggaaacctaaagttgtaatttactctgtctaatcattgtatcyscgctgcctcccatagctctaactgaggaactggattctataaccagtgagctacatgcagtagaaattcaaattcaagaacttacggaaaggcaacaagagcttattcagaaaaaaaaagtcctgacaaagaaaataaagcagtgtttagaggattctgatgccggggcaagcaatgaatatgattcttcacctgccgcttggaataaagaaggttaacttttttttttttttttttgctagttttatttcttctcatattttaaaaaactagaatgaattcttgatgggacagtgctttccagtaggcttagaggtgaaactggccatttctccagtggaatgggaaacttgcagrtggatcattctttccctgtgttctgtagtcttcaaattaaacttttattattcagacatttttttccagttattgttacagcaacattgatcatgtttagaaaatgagatacttcctttacctacattaacaaacagttaagaaaaaaaattcaaactccttgccaaaggttagatcattttcctgccctagtgaacaaacctttcatgattcaagaccttatcaaacatcaagtttatcaattataaatagaataatagaataattagaataactctagaagggattgtgctttttgtggatgttgcttttcaatgattcacgtctgaacaagatatttacaccaaaaattccagataattgttaactttgttcatgatatttgagtactttatgatgctgtgaattccctgatcaacattcagacaattttttaaatacctgatcaaacaccttcctttcttgtgtgggttaattctcaactggcaaatgtttacatttgttactttttttttgtttttgagatagggtcttgctttgttgcccaggctggagtgcagtggcacaaccacaactcactgcagcctcaaactcccagcctcaagcaatcctccctcctcagcctccttagtagctgggactacaggtgcacagaaccacacctggctactttaaaaaaaatttttttatagggatagagtcttgccatcgcttgagctcaggctggtctcgaactcctgagctcaagtaatcctcctgcttaggcctcccaaaactgttgagattataggcatgagccaccatgcctactatgtcttataatacatcatttaacttgtttttgctttgcttagctagtgagttaatctcaaaactattatcataaaagtttaatggtctataagtattagaagtcttatatatgtttgtctcattcttatcaaacttctataatagtcttacatgtttgtctgattcttaactttcttttcctagattttccatggtctggtaaagttaaagatattctgcaaaatgtctttaaactggaaaagttcagaccacttcagcttgaaactattaacrtaacaatggctggaaaggaggtatttcttgttatgcctacaggaggtggaaagagcttatgttaccagttaccagcattatgttcagatggtatgtactaaaaaaattaattttgagttgaagaagtgctttgtcatcatacctttttaattcttttaaaaaataatttataatcatacatatataaaaatcaagtgcatttttgtttgatttcttctatattaatagaaatttaaagtttcacttaaaggaggaattttatttattttttattttagattcaggggtatatgtgcaggtttgttacatgggtatattgtgtgatgctgagatttggacttctaatgatccatcgtccaagtagtaaacatagtacctgctaggtagtttttcagcccttgccctcctctctccctaaaggaggagttttaaaaacttctgagattaatccttttatctggttcctgaaacataaatttaaaaacatattgtactgaacattcaaaatcctctcttctagyttttcgaaaccctatctaaattattgttaaccatattcaccctacagtgctatagaacacttgaacagaagatacaaggggcaaaaaaacccaaaaatgttgtaggagaagcagctctggaagaagaatcagtagacctgaattctagtcccagatctttactgagtgtctgccatggtgctaggcactgggagacacagtagtgagcaaaatgggcgtggtcttagttttcacagaactcatagtgtagagtagcactttctcagactttagtgtacataagaatcacctgagaatttgattatgtgcagattctgattttatgtgagaccaaagatcctgcatttctaacaagttcgctagtgctactgatattactgattgggtagtagcaagggatcagcaagctttttcttgaaagggtagatagtaaataatataggcttgtggtccatatggtctccttggcagctcttcaaccctgccattgtagcacaaaagcagccacagataatgtgtaaacacatgggtgtagctgtgttccattaaaataacttacaaaaataggcaaccagcccttactttgttgatccctggtttagagaatacaggtaattgcaagcaattgcaataagaattttgggataaaggttttaatagggaattaagtctgtacaaagatctggtctaggggctgtcagggaaagctgttctgaggaagtggcatttaagctaaagtttaaagggcgagtaggcagaagggacagggaaggaagagtgttcattcagaaaagcaatacttgagatccaaaagcaagagagaacattcacattatgatgtattcagtaacctggaggaatttctatgtggcagtcagtggtaagacatgtggaaagagtcttatttttaaaacttttccttattttagcaagaagccattgaagagttttacacaggtaagagactcattatttcatggtttagaaggataattctagcagttagatgaattccagatacatctggaagatagattcaatgggacttggtatttattgcttgggrggaaaggagaaagaagagtcaagaatgatactcaaattttaggcttggacaartggtgaggttcttcactgaaatggggtacattggcgaaagaactcttgggaatggagaggggaaagatgatgaatttatttgggacatgttgaatttacgatgcctttaagacatccaggtggaattgtcctatgagtaggaggatgtttgtgtctaaagcctggtgttagaggtctgagttgggggttgttagtgtggagatggccactgaagccattggaatgaatttcagagcagcataagaagaaaagaaggcctagaacagaaaccagaacaccaagagtttagggataaacagagaaaaagggcttgcagacaaggctgagaaagagtagcaacatataggataaccaggattgtatgatgttattagaaggctagggaagggtgtgtttgaatgagggagtagttaatagtgatgtctgttagcaaaatgtcaaatacgtaaggatgtaagtttcaatgagtttaatgacaaaggactcatctatgaccttagctagagcaattttattgaaatggttgggtggagaccaaatagcaatggtttgaagcaggtaggaattgaggaagtggaactggtgagtatgggattctctttggaaaagaatgactatgaagggaagaagagagtgggccataaatgagatgttatcttagtctattccagctgctgtaacagaatactttatatcagttaattaacaaacaacagaagtttactgcttgcagttctggaggctgggaagtccaagatcaagatgctaatagatttcggtgtctagagagggggtgtttctcatagatggcaccttcttgctacaccctcacatggcggcaaagaaagggcactcccttcaactttttgtaaaatggcattaatcccacttatgaaagcagagccctcattacttaatcacttctgtggggataccaactttcagaccatagtgggtgttttccaagatgagagggacttgaccatgtttaaatgtaatgagtaggtgctagtaaggaaaagtgaaaataataggagagagaataattgactgggaaaaatccctaataaggtcttaatttgattatgttttttaaacatgtctgctctttgccaaaggttgttttaagaaacaaactacagaaacgtaaagccatatataattttaactgtagaatagcttttgtactttaaacagtttcaattataaggaagggggcatattactataacttcattcagacagtaaactgttcactgatttctactyagcataaatgaatctcgtacaaaaagtaaaagaatgcttatgcaactatcatgtttaattatacacactactgtataattaaaaatctggtttttttggaaagctttatagtgatttttccctgatgaaactgtttagtgtttgaactgatatatgttgtcttactgaaattaccaatagtgattatttaaaacgatagcaaattaaacatttgaaatgataaaaatctgtctttatttttataaggatagagttctgtttagttgtatgtttgtttatttggcttctacttaccttgtttggtcatttattcatatctaattaatgagagtaagaagtaagctttactaaagctgcattaaaaattaatctgaattgatggccagtgcccacaagttaagaaggtgaatgggccgggcgtggtagctcatgcctgtaatcctagcactttggraggccaaggtgggcagattgcctgagctcaggagtttgagaccagcctgggcaacacagtgaaaccctgtccctactaaaatacaaaagaaattagccaggcatggcagcaggtgcctgtagtcccagctactcrggaggctgaggcaggagaattgcttgaacccgggaggcagaggttgcaatgagccaacatcgcaccactgcactctagcctgggcaagagagtgagactccatctctaaaaaaaaaaaaaaaaaaaaaaaaaaaaaaggtgaatggtttgcatctgattctgagggtggtgtaaagtttaaggtagattttttttttttctcttttaggttttacactcgtcatttgcccattgatctctcttatggaagaccaattaatggttttaaaacaattaggaatttcagcaaccatgttaaatgcttctagttctaaggtatgtttcagtggcttttttttttttaatgtaaactattcactgaaataggagctttacctgcagttgagttgcttataaaattataaactgttaactatttatatcaggagttacaaactactgctcttggccagttctggcccactgtctatttttgtatgtcccatgagttaagaatggtttttatatttttaaatggctaaaaaaaatctaaaaagaatattttgtgaaatgggaaaattatttgcaattcaagtttcagtatccataaataaagttttattgaaacaccaccatgctcatttgttgacatgttgtctatggctgcttttacagtataatggcacagtggagtagttgtgatagagaccttatagcccataaaacctaatatttttgtctgatactttacaggaaacatttgctgacctgttttgtattatccattctaaaatagtaagggagaattgctaattatgcagtgtaattaaatatgaaatatgaattattaagaagttaccctatacctgtggaatttcttgtatttaggaatggactgtcttaccctcatctgtagaataaagcatttcccagctattcttttttaaaaagcatattactgaaatcttcaaaaggagagagaatagcataaaaactgccatgtagccatttcccccttcaacagttatcaacatacggctaatctttttttttaatctgtatacctccagttttccctacccctttcctcttagtttatttattcagaacaaattccagacatcatattttaattgtaaattcttcagtacgtatctctaactttaaagaaaagtgctrtgccatcatcacatctaagaagtttaatcaattctttagaattataaaaaaaattcagatttctatctcatttttatgtttttttttaaaaaaaatatagcccagataatattcatgcattgtattgtatttggttgatatacccataggttctctttatatcttttatatttcccatgcaaattctttgttgaagaaactgggttaactgtcctgtatctttctacattttcctgattgcgtccttgtggtgttctttctttctctctttcttttcttttctttctttttctttttttttttttcagttctggggtmcatatgcaggatgtgcaggtttgttacataggtaactggatccttttagttagatctaaaagcctgattgtatttggaatttttctttaacttttttttttttttttgcaagagtatacttactgtggtatcactcaagtggtacatagtacctggttatctttttgtgatgctaagcgtcagtgggttcaagtgatgtctgcctgatctctggttatcagtttttcatctaatggttttagcagccactgagtggcaccgtgagagccatgatttcattagggaggtgcaaaatggtgatatctaattctgtcactctttcttcatgtattagttatactttttctacaaaaataaactttttcctcattaactctgcatgatgaaaatgcttgatttttttttccctttctttatgagttttcagaaagagttggttttctagcattctccaaaggtggtcaacaagatttttaaggttttctttccccaagtatcactataaacttacaagctttgacgtataatatgattcacctttggaatcatatatatatatatawcaatatrtatatatgtaatgctgaaatagtcctgtccttgggcagtgagagcctctttaagttggttcctgaatcctttctcttaaccccattgcttctgttccttgctttcttttgcagtaagataatccatgttcattttatgcatttcctgcccagacctagagtcagccatacctctaagaagccctggttcctttagtttacccatatatttttgttttatttaaactccatgtcattctattataactgctccttcctccaacaaaatcaatctgtggagaaaactgccttctaataatgtactttcttaaaattgaaaaagaacataatagtaatagaaagtaatttagaaagttgcagataattacaagttcatgatatatccctactcttgaaagttggagagagaaaaaaagaacatctgtatcctagaatatatctaggagttaacaaactgmttctttgctgggatgatgaaagtagtttgactgtctctttctatctcattcactggcatgtttttatacttttttggtcctctttagattagaaggaaaaaaaatgacatctaatatgctaagtattgtatagaattgtatgagtactaagaatctaataactgttaccttttaagatttattattattatcttaatttaatgagtgatactttgtgaaaccccatggtctttatatttaaataaagagattaaaagatttgatggtatcatttgagaagttaataaataataaattttgttcacatacataaagggattataaatataatgttaaaattaataaaacccacctttataaccataacaattgcatctagctcacattttagaatatattatgaacaatttaggattatgccttcatagaataaatgctcttcattggagtatctgtttgtgttcttttttgtcaagtgagttttttttagtcatcaacaatgtagacgttagtaaataactagaatgctatttacacagctgccatgatgtttcgtactgagacatggtttcagttttaatgaactaaacatctgctcctagaagagccaaagsctattattgctttggagaaatgaacgttttcatttaccacctagtatttcagtctgctagcttagttttactatcattgtgtctatttttttcttttaataggagcatgttaaatgggttcatgctgaaatggtaaataaaaactccgagttaaagctgatttatgtgactccagagaaaattgcaaaaagcaaaatgtttatgtcaagactagagaaagcctatgaagcaaggagatttactcgaattgctgtggatgaagttcactgctgtagtcagtggggacatgatttcagacctggtatgtatgttttatctagaaaactttttgatgtcatagaccgtgtccttactcagcttggcatgatggaaatctctgcttctattaaaatcatcctcaagtagttacacattgaatatccgttatccagaatgttcggaaccaaaagggttttaaattttggatttttttggatttgggatgatcaacctgtattacttattttatcttgcctcattatgaggaggactgagaggcagaatgtttagtttcattccccactgtagtctgtagtttaattgcccttgtcaattatggacaaatatggacacatatgtttactagccaatagtggacatctttgtggcatttatgacatctaggtattccttcacatttgttgaagaatttgcatctgtttcaaagttgtcatctttagtcatcattctgagggtcttttcagcacccacatacaactcctcagcatgaaactttgatgagatatttttagtgacctttttcttcaccccaccacctaatcctacagtcatagcctaaagtaagttactcagaattgttatatgcaaaaaaatcttaaattcaaaaatccgactccctggcttcaacctgttttccttctgaagcttttcacacattaggatttgctggatccctcttttaatccctgcttatttatccaggctcctgtccctacatagcaatcactctgtttcccgtccagacactgtgctgttgccccttacttctgttatatttgccctggactgcctggccattctgccagtctgcttcaggcgttgtgcctgagatgctggattcatctagactttggctttccccattcctgctgcttggctactaaacattgtcaaaaaaacaaaaattgcataactccattcagcttttcattatcctcagccgtccttatacttgtccctatttcaactcctttatacatttcttccaacaaatgtctcctatcattaactttctattcaggccctaacttgtacttagcagatgctttctgcttcacagaaaatagatgccatcaggtatgaacagctcctctttctaytttcaaacattagtaatctttttttttttttcttttgttaaggcagaaaagaccactgctttataaggctaaccatgaccactcccgtttcatcctttcctgccttcttaagatcttgcactgccaaattcctcactccttcaccttcaggctcttttgtcctctccctaaaaacagaaactaaaacacccttctgaccttttaatgttactgtcctctttctgttctttctgtcaccatcagacttctcagcttaccatctccatttttcacctttaacccattctgaactcattgaatcatgcttctgccaccaccatactactgaaacaggtcatcggwgacccacccccagatgagaccacttcatcaagtggtctcatcttcattcctcttcccacttcacttcagtaacattttatatattcacctctcaccttgccacattctactcccttggttactgtacagcagtgctgttcagtgtcttcccttccattctcacctccttcgctcttcctgtcttctttttaaatattagtgttccctagggttctgacctcagtctttaccctttcttacgtttctccagggatagtgagcttgtagcccgaagactgcattctctacctacagaattattatgggcattgtttttatttatttatatattttaaatagatttaaatgccttaaacgggatgtatacgcctttctattaagggcccctcttttcttaaccagatagcgccacatagttgttacctggtggccactgaagttacctgatttgtgactcttgccctattttcaacctaaatggtttgatcccttatgattatcacccttgcttaagtattaccatgacttatgttgtctctgtggatctgctgccaaagtgtaaaacattattcccatatctaattagctaactgctaaactttaaatttatactcctaattgtttatcagaaatgtgtatctaaattagcatgaccaaaactaaattcccccaaaagaactgctctttttcttctcaactgggaatattttccccataactctactcgacattctaaccaaaaactttttgttttcttcgcctttcctttctccgttctcctctctactcccaagcaatttccccttcagtcttctctgtcttagaaaatcatccactcactcacatgtttgctgaagccaaaattttagcagttatctttatcatttaggttccagtcaggagacagttatttgaacagagagaattttttagaaagaattgtgaactaggtaaaaagtagctaaatagataactgaaaaagtaaaaagaaaacgaagatatcatggagttaaaaactggaagaagcaacaaccacctgtagggctgggagaacaggaagaaaagattggaacaaataagacttagaaacttaatgaagagggcttgtggaactgagctccctggtgctggagtctcttggtagaggcagaggtggggtacgtctgtgataaagctggttctccaaaggctgagaaaagtgccaactgtatttagttgctcttaaggaaagaagtgctgctgcagggatgagaagccttgcaggggtgacagtcacaggaacacaagcaagcccacaggaagcagttagggaggaagcagccatggtgtcttccatccagggccagcaggcaaagctgatgcgtagtgtgcagagtccttggtgcagcatcccaaagcacagtatagaagggtggggttagagatgacaaaaaaaaaatggatgacacaccgtccttgatttaccctccctttgcagatccagtccaccactaagtgttgtcagctctgcctctagaatgaatctcaagtttgtctactctctgtgcacctacgtcttacatacagttgagctcccttccactggtctactgcagcagcttcctaagtagtctttgattccgttcttacactttttgttcattctccacagagcaaccagtgatattttctaaatacacatcaaatcatgttacttccctacctaaactacccagtagctactgtgtacttagaataaaacccagcgttcttaactggggcccatagggtaatatgtgatctgcccccatctgtctacctgatttcctactcttcctctcttcttaagccccagcatactgggcttatcattatragcacttaccactctctaatggcatatttattggtttactctttgtattgtcttgtttctttgcttgaattatagacacatttgcatagcatttttgtcttgttcatcactttatcttcagtgcctagggaaatgcttggcacacaattaaaaaggtgttcaacatttatctattgatgaatgggtaaatccagcactgtctccctcttccctgccacctccatatcccagtagtcactaggacctgtaggttcatgtatgtctctttactctttttgatttatcctgaatgtcatgtctcattttatattctgtattatttgttttctggtctgttactgccatcttttaactggttttccttcagtgttttgtctattccagtctgtattttgcactgtcaccaaaagatgatttatgaagcataggtctttaaaaattacatgatgggctcggtgcggtggctcacgcctgtaatcccagcactttgggaggccgaggcgggcggatcacctgaggtcaggaattcaagaccagcctggccaacgtggtgaaaccccgtctctactaaaaatataaaaattagccaggtgtggtggtgtatgcctgtaatcccagctactcgaaaggctaaggcgggagaatggcgtgaacccgggaggtggagcttgcagtgagccaagatcgtgtcactgcactccaacctgggtgacagagtgagactccatctcaaaaaaaaaaaaaaaaaaaattacatgatgattcctcatttcctgtaggataaagtctcagcttagaatcaactggttgaattgttcatagcttttcttaaacctgccttgtacataacagtgtcagtcagggttcaggcagagaagcagagtcacgatgaatgttatgggataacggttttactgtaggaagtagatcttgaacaattgtgggaggaactggggaagtgcaggtctgaagaggggagttggaggattagagaaaagtaatggattgatacctaagcactggtgcaggaggacgaggcggagcttgtagggaaatctgcagctggcatgtacagtggcaaaggggacccctaaagggaagytcgtggaaaggtctctggtaagctacttcctgtgagtagctatcgcctctgtgggtctgctgttgattggcaggacctgcagttgggaggaacagctgaatgaggaatggaaaagaactaggatgacctagaactggctgagcacttctgcatctgtccatcatcctctctgcgtgtaaagaccttgaaggagtgatgttagctggttcacttctgccaccaaatcttgcacaagtccctcttttgggtcagctctaacttggaacaggaaagagattctgggagatgtaattcacagcttaatggattggacagtaaatccatccaccacaagactctgtgacttagccccagtgaactgcttgctgttatctgaacatactaatttcatgtcagtgtatttgcagtgtatatgctgtttcctctgcgtgatgttcgtctcttcctagtgaacttctgctcattctcttaagacacaactcaagtattatctccttgaaatcttcacttcccaagcagctgctctgtcctctttgttttcatagtagtcctctacttagcatgtaagcaatttctaccacatttttttcagtttcctccaaatagtttaagtgacaatttatctagtgatgtagatgcttataacaagtttgagcctagaatggtttccgagaaataggttatatacaaagcagtgccgcccttaccaagatttttttggtctgatgacactaggtggtagcaggggtttgtctgatggcctgttttatcttttgttagttgtaataaattaaaacactgtggctatacccactgtctcttgagtccaccgtgaccaagagtaatgtctgaaataaacgtaataaagcctgcccatcaaagaggctaacacagaactgcaaatttactgctatagatggctgtggaaacaaaatcatagtagtcatcgattatctgcataatgttaaaagatataatttactctaactcttaaaggatagaaaaagggccactttgtttgttttttcagattataaggcacttggtatcttaaagcggcagttccctaacgcatcactaattgggctgactgcaactgcaacaaatcacgttttgacggatgctcagaaaattttgtgcattgaaaagtgttttacttttacagcttcttttaataggccaaatctatattatgaggtatgtaatttttatgtcaattccttacttttgtgaagaattacgcagaggggatctgcctttttattatgtttatttacatgagcagttaagtacttacaaaaatttttaacattaggaggtaattataagtagattctgtgattagggcttcattcatgtatcttttgctacataaacctttgttagattaaatggaagacacctgctaggtgatactttttataaaacatatgagtaagtcatatatctttgttaaatttctgtatgttcttttttgtataaagatggagagaaaggatggagtgatactaaggaccctaataacatctctgttcaaattaattactaagtgatagaagtattcatatgccattaaagatttgccaattctatttgaattttatttgataaacttgaaaatcaaataacctaacagctgtcttttctttctttctaaacccttttaagaatagatttaatatttttctgagttttcattaaagagttatttatgttacggtttgtttttataaaagtagcatcgcaaaataaaaaagtctgcatccttgcaagttattcactgctcaygtgcttgctcttctctggtaaattaaaaaaataaagatcaagaagagtctgggaggaggaacagatgagtcagatgggttgaatcctgtgagtaagtgaaagagtaataggaaaaaaaacactatggtcatgaaagaactgcatcctgaaagttgtacrtagacagccacttggatggtactcattcatttactttttaataagttaagttttttttaggttcggcagaagccctcaaacactgaagattttattgaggatattgtaaagctcattaatgggagatacaaagggcaatcaggtaatgtaaaaacaaaccaactttggagacagagataactttcaaaaagtgacttcatatcatattgataattatrctgataactgaataacaccaaaaaaaattaatgtatrgcagaagatacttgaaaatacgtgataaaattaattcacttgatcttagaaattgggtgtgacatttgcttatgccrtagattatgagtcgtcaaattgcctgatttatttttgcttatttacacttgctttagaatagacctgatgacttaatgttaattatcaacagcacatatttagtatgtatccactgtgtacaaaatagtggattaagcaactgatattctaaagggatagaaaatatactcccttacagtaaaggacacgttaaagcaataaataaatccagtagtacatactgaatagattaagcacagatcgagttgtgagtatatatacatggttttctgggtttaatgactaagcaaatgttactgaagcaaagaatttgtgtgaaagtagcattttaaactgttctrtagattttcaggaggtagtcctgggtaaaaggagttctagggtcaaatgaatttgagaaaggttgcaggtatttattctgcctggatgttcacagggtgtatcagcaaactagaagctctgaccatccctgaaaataaagagagacacccatttaactttgttgaatgcaatgttctccaaattaatttgcatgcaaattaatctaaattaacccaaaattaatctggagaacactgcattcatagcacatttgttagcatcttacagacatcagtttgagaaatactgtttagtgggagataaagttaaagagagaaaagagataacaggaacaaaaactgatggctcaggctcatttctgctttaaaggaagctggtgctcaaatctggaattataccaaaatgtcaatatatgcacaaggccttgaaatttttcataattctttttttccttctgtgcattgtattaatcaatgtcctgaatgtgtgtgttgaaaacyatcttccaggaatatgccatrtctatctaacaaatgcacatattttactgcaggaatcatatattgtttttctcagaaagactctgaacaagttacggttagtttgcagaatctgggaattcatgcaggtgcttaccatgccaatttggagccagaagataagaccacagttcatagaaaatggtcagccaatgaaattcaggttaggtctatatcttccatagaagcctaatttacctttaaaatatttaaacttgatttaattaactgataaaatgttaaaatatttcaggtagtagtggcaactgttgcatttggtatgggaattgataagccagatgtgaggtttgttatccatcattcaatgagtaaatccatggaaaattattaccaagagagtggacgtgcaggtatgtaggactcaaatccagaagtaaatttttagaaagcttttccaaaaaatacatgataaatgyttaataagtctgtatrttttatctttattggatagtatttttagaacaatgtatttttagcagtttgacacttacttgcatatggagaaatttttacttatgttctgttatctgaattgtttctttttatgtgtgttaagataatttgatgttcatctttgcctcctgaatttttaattagtgatttcaaatctataacttaactggattatagacacattttttaacttagtagagctgattattgatgtctctttagagttttttttaatttgagggtacccattacaaattaacttccacatctctaaaatttctagatgtagtataaaacattgcctgctaattttaccatatgtcatttttgcatattttgaatttgtaaatgtaattctgcaatctcaaggtttctcacaccacaggtcgagatgacatgaaagcagactgtattttgtactacggctttggagatatattcagaataagttcaatggtggtgatggaaaatgtgggacagcagaagctttatgagatggtatcatactgtcaaaacataagcaagtaagccacatacctttttataacttttaycaattaaagcaaatatgaaagtatatgacatcgtttttaagttcttactaaatacattggtggaacaccaaastgcagatccataaaagcagatgttggagggtaggaaccagcacatcaacctgtatgatctgccttagttcaagaaaagatgccctatctttgagataatcctccaaaactacttktttaattgaaggtttttgagacacattgatagcaacttgaaggctttttttctctggcactgctgtacagttacatgatttaataattttgaaaaggtctatggttaagataggcattttgagagtcaagctcagtaacgtgccaccttgccagctcatgtgtcaatgaaataccaagtttctccttaagaagtaagtttaaatctacttagggtggctttagactagatagcttcctgaaagctttctgtcatagttatctttgtgctyttattgcctatcacataagaagtgctcagaaatgtcgaggtggtaaatagcagccagacagtgatagaaatgttctttctttccaatagatacwacaataatctagttaaaagaaatgagaaaatgaaaatgtcttccaaaggccagtagagtctcatgaagcatattttaaggtttcaactcaaatattgctactttattaaaatataagaaactattttactgtcaagaatattctcctaatagttgcaaaacattgaatttaaaaatggaactcagacaattttttaaacagtgtttatcaagaatatgtggggaaaaaagtcctatgtcgggggcacartggccccccaaagatgttcacgtcctaattcctaacctgtatgttacctcacatggcaaaaggaaagtagcattgcacatggaattaagactgttcattagctgaccttaaaatagggagattattttagattgtgtgatgtgagaagaacctgacactctgattttgatccagtgaaacccatagtacacttctaaatctaaaccacagaaatgtaagaataaatgtgtttaaagccactaagtttatggtaatattatggcagttataggaagctaatacagtatataactatgtaagctgaaatagagattcttaaaactttattatatcctttaataatttgtatctttaaatgtgtttgcagatgtcgtcgtgtgttgatggctcaacattttgatgaagtatggaactcagaagcatgtaacaaaatgtgcgataactgctgtaaagacagtggtgagtttgttgttttgtaaacctttataggctaatacagtcataatgcctagtgacagagatacgttctgagaaatgcatcactaggtgattttgtcattgtgcaaacatcaaagtgtacttacataaacctagatggtatagtctcctaggtkatatgktatagcctattgatcctaggctaccaatctgtacagygtgttactgtactgcatactgcaggcagctgtaacacatggttaagtatttgtgtatctaaacatagagtaagtacagtaaaaatatggtattataacctgggtgacagcgagactccgtctcaaaaaaaaatawatggtattatataatctcttgggaccactggcatatacgtggtccatcaccgaccaaaatattatgtggcacaaaactgtatatacagctgggacatgagagaagtattagacttccaaatggatttaaaagattaaagtgtgaatcagattttccagaattaaaactatcaacatgaagttttgaaacaaaggtgaataaaaggaaaagtcttatgtgtatgcacacattttatattgctatactgaggatgtgaaatttttaataaatgaaggaaaatatttgaatttttctgaatagaaatgctattctataagaaaagggaaaccatgtgataatctctaatactttatagtcactaattgaaaagaaaatttagtgcaaaatagagactatagagaatcacttttgatccagttaatggctagtcatcggagatttacttaaaattcttttaaatgtagatcagcaggatttgttttctgagcattggtcacaaccctgctgatcaaaacaggatctggtcaaaacaagatatagcaaagaaactggcccaaacaagttagaactagaaaatataatgtatttgcatgatgtaagacactcccactagcaccatgacagtttacaaatgccgtgacaatgcccgaaaattacatggttctaggaactccctaaccttttctagaagattcatgaataatcttccccttatttagcatataactaaggagcagctataaataccgctagtgagcaatgtacagtgccactctgcctttggggtagccctgctctgtctatggagccgccattttcctatactctattgctaataaacttgctttgctttcactttactctgttggcttgctctcagattgtttcttgcatgaaactgggaaccctcctgggctgagtcccaattttcggatttgcctgcagcattttggcactatattttaactttttttcatccgtgtgttgtatttcaagatctggactagccastacctcatggtaagaccttactgagttctgatgccttgttaggtggaagccactgtatttttaactttgcagacagagaaatttatgagtttattagactatcttataaaataacaagagtgttatatataaatcagagtactggtctcttaataattgggttatcagttgaggacattcttgttgctaaatcagagttcactcaggagcctatactagaacagacagggtctcctataaaacacacctcttagtaacttagtaatcatgtctggcagacactttctgatttctagagtatatggcagggcttctgataaccaatttttttttatatatatcactgtaaaccccacaatgcttacagagaccataacttggtctagtgacagagacttgaggaatagcctagtcttaattcagaatacatttaaaaatcaatgtttagggtggctcacattgataaccagctttaaaccagtttaactacttaagatagcctatctttgccctcatttctaaatcctaattacctgctaccatatttgttttattacagcatttgaaagaamgaacataacagagtactgcagasatctaatcaagatcctgaagcaggcagaggaactgaatgaaaaactcactccattgaaactgattgattcttggatgggaaagggtgcagcaaaactgagagtagcaggtgttgtggctcccacacttcctcgtgaagatctggagaagattattgcacactttctaatacagcagtatcttaagtatgtacaaactcattcattattctttcaggttgtctttatggtttttttwaaaaattgcaacagaataaacggttttgcagttattttgtgtgaacttttaaatgctatagaaagtaatttacctaaaacactcaaactttaatcactataaataaaaaaaagtaacgaaaatattttctttaaaggctttatttgcattcttgtaaattttattatttcaagtcaatgtgttaaraattactgcrcatatagttatttcttttataaatttgttttccgtgattccttcaaaagctttcttattgttggcmtttattttctgcagaraagactacagttttacagcttatgctaccatttcktatttgaaaataggacctaaagctaaycttctgaacaatgaggcacatgctattactatgcaagtgacaaagtccacrcagaactctttcagggtaaatggctattaattttcagttttatatattttaaaaagtatattaaagcctatgggatgcttttctgtcatattcccctaggtccagttgaacatgagaaaagtcagttttctgattagatttctgggtatggaagagagaaaatatagttttctgtaaagatgtaagtgaaagaatttagactggccttttaacataaactaggggtttccagtttcttggaatgggaggactccgtttgaatatctaattttgttatgcactctgctcttatttggttgtgattactaatagttgagaagtctgtttctgctgttccagtggttagaaaccactgttttaaaccaaatactatcaagtctgcaaaagcatgtcaagtcaagtgccattgtgtctaaggacatttgaggtctttagaacttctctcacaatgtagccccttttattcaaaatagagctcatatttgaatagaaatttgtagataaaaaactagacccctgtatacttaaaaagccaactgatacagaaagaatattttgaaatatttaatctcatgagaaaactgaatagctggatttttaccaaggtgcttgctttgttattttttttttttgtaggctgaatcgtctcaaacttgtcattctgaacaaggtgataaaaagatggaggaaaaaaattcaggcaacttccagaagaaggctgcaaacatgcttcagcaatctggttctaagaatacaggagctaagaaaagaaaaatcgatgatgcctgacatgaatgttactaaattttctaattaaagatggtttatgcatgtatatgccactatttttgtagttagacaatagtttttaaaagaatttcatagatattttatatgtatggatctatattttcagagcttatctctgaagatctaaacttttgagaatgtttgaaaattagagatcacgattatataattttccagtataaaacaagggaaaaatttttatgtaaaaccctttaattgtaaaatatttgagaataagttcatataattgtcttaagttttttatgcctttatatacttagctatattttttcttttgacataactatctttttgaaagcaatattatactgacagaggctcaatgagtgatactttaagttaaatatgtagatcagggatgtccaatcttttggcttccctgagccacattggaagaagaattgtcttgggcctcacataaaatatgctaacactgatgacagctgatgagcttaaaaaaaaaattgcaagaaaaatctcatgttttaagaaagtttacaaaaaatgtaaaatatttgagaataagtccatataattgtcttaagttttttatgcctttatatacttagctatattttttcttttgacataactatctttttgaaagcaatattacactgacagaggctcactgagtgatactttaagttaaatatgtagatcagggatgtccaatcttttggcttccctgagccacattggaagaagaattgtcttgggccgcacataaaacatgctaacactgacgatagctgataagcttaaaaaaaaattgcaagaaaaatctcaagttttaagaaagtttacaaatttgtgttgggctgcattcaaagctgtcctgggctgcattcgacccgtgggctagagttggacaagcttgtagatgatttcaggttataaaaccagaagtacaattcaacaaaaaaggagtaagtcatcaatataaatattagcaaacgagatattgctacatctctatttaaagtaaaatacaaccgattttaaagttcctgaaaccacagccatattttgacatttcacaaagaatggttctaatctactagagtacatttggctaaatagataacttacctaaatttgctccaaagctaaatcacaagtaaacatatttatgtttaaaacacagaaataaataacttaagatttttatccaagtggtcagtgttgtattggaaagatatatctataaataaactttgaactgatttcaaacttagaatttatgtttttatatttttccactaatatcattatcacttctgtaattttcagtgtggtcatcattaactcaatacagtcattcattttattgacttgtgatttttctggtgtcatttggaactttatatgattcctgaagaaattccatttttagtcaaaataatcttctatatcaatatttggatctagcagatcttctccatatgatgaaagattcatttggtttaagattaggttttcaaatgtttcttctaaatcggtttcaccaattaagacagctcccatcattcgtccattttgcatgacgactttgatgtattctcgtcctttggtacatctcagcattaattcatgatctgaacctaagccctgtgcattgtattttcccagcagtacaacctatatttagagataaaaaggttattgtcatgagtatcataaagaaaatgtaatgggtagttattttgtgtcaagtttgaatagccgcagaaaacttatgccacaaaatttcataactaaaaatgttattggggagagtcccaaagaaaatgtttcaacagcatgcgttaattctacagatgacactatcacacactctacactgacattaaaaaattctggtgaatatagtcaaatgttaatgtttaatattttaacactaaaaatatctagtgaatataggtaggtgattctaccaatctatatgaacattaaaactatacagtaaatatataaatatgtaggatgtggatacattaaaccatgtggagtcgtggtttaaagatttggcaaggaactgaattagagctttcatggaaaagtttcttaatttccctgaggcttttgaatatgtttctccttctctgtaaattagggaaaaaaaaaaaacccaaaacaacctttgtcaatgtgaagaggactgaataagataatagatacaggaaagctcttggtttatttttgagtacaacagcagttagttcccctcacaaagaaaggatgaatcacaagtaaaagttaaaaatgcaccaacaagtaacagatctagagagaaatttttttccctcttaactaaaatagaatagtggtaaggtggataattatcagatgattagggattaagactagcaataataccaggtattggtttgtaagaaatgaaaaatgtcatttttttgtagatgattaaaactatgtacgtttttattcaagcaagaaaatcacatgatttatcatagtcataagactaacaagcagagaaggcattaatatgcttaactatcttaccttatagttaaaaaattttgtcacatgagcaaacagttcaaagctgaaatccatgtcaatagagtctcctgaactcgctgcagccatgcactttgctgcataccatcccatctgtctagcctgggtccacagcctcatctgaaatgatgaaaaaatgttacacaatgtcatttttcatgatcattatctgaaaaatgttaaccttgtaaattcacttaaaggagttcaatgtttgacagtctttctgtcatctttgccacagaagcagtcaccaatggataactaatcagactgatttttggtatttgttaattctatctaaattactgcctctaaaattaaaagatgataccaatcacacctgttttagtagcatttctattaaatattatgaaactatattaagctataccaggtgagaaaaatgttttaattaaccagtcccttcttcaaaaatttgtcatcaccattaacagagatgtcaaattatcactgaagaatttgttctattttccagcaaccttcatttttatgcactacttaaggtctgctgtgctgttaacctcagtggttagacagactcttggtgcctcaccaagacaacataaatatctcagcaactgattctgggaagtcatttaaattgttttgcatgaccgtattaattcatctattgtatttttattttatttctatgaagttttgagactccctggtataaaagaacacggcctttgacaaaattcaacaacccttcatgctaaaaactctcaataaggtattgatgggacgtatctcaaaataataagatctatgacaaacccacagccaatatcatactgaatgaacaaaaactggaagcattccctttgaaaactggcataagacagggatgccctctctcaccactcctattcaacatagtgttggaagttctggccagggcaatcaggcaggagaagggaataaagggcattcaattaggaaaagaggaagtcaaattgtccctgtttgcagatgacatgattgtatatctagaaaaccccatcagctcagcccaaaatcttaagctgataagcaacttcagcaaagtctcaggatacaaaatcaatgtgcaaaaatcacaagcattcttatacaccaataacagacaaacagagccaaatcatgagtgaattcccattcacaattgcttcaaagagaataaaatacctaggaatccaacttacaagggatgtgaaggacctcttcaaggagaactacaaaccactgctcaatgaaataaaataggatacaaacaaatggaagaacattccatgctcatgggtaggaagaatcaatatcgtgaaaatggccatactgcccaaggtaatttatagattcaatgccatccccatcaagctaccaatgactttcttcacagaattggaaaaaactactttaaagttcatatggaaccaaaaaagagcccgcatcgccaagtcaatcctaagccaaaagaacaaagctggaggcatcacgctacctgacttcaaactgtactacaaggctacagtaaccaaaacagcatggtactggtaccaaaacagagatatagaccaatcgagcagaacagaaccctcagaaataatgcctcatatctacaactatctgatctttcacaaacctgacaaaaagaagaaatggggaagggattccctatttaataaatggtgctgggaaaactggctagccatatgtagaaagctgaaacgggatcccttccttacaccttatacaaaaattaattcaagatggattaaagacttacatgttagacctaaaaccataaaaaccctagaagaaaacctaggcaataccattcaggacataggcatgggcaaggacttcatgtctaaaacaccaaaagcaatggcaacaaaagtcaaaattaacaaatgggatctaattacactaaagagcttctgcacagtaaaagaaaccaccatcagagtgaacaggcaacctacagaatgggagaaaatttttgcaacctactcgtctgacaaatggctaatatccagaatctacaatgaactcaaacaaatttacaaaaaaaaamcaaccccatcaaaaagtcggcgaaggatatgaacagacacttctcaaaagaagatatttatgcagccaaaagacaaatgaaaaaatgctcatcatcactggccatcagagaaatgcaaatcaaaaccacagtgagataccatctcacaccagttagaatggcaatcattaaaaagtcaggaaacaacatgtgctggagaggatgtggagaaataggaacacttttacactgttggtgggactgtaaactagttcaaccattgtggaagttggtgtggcgattcctcagggatctagaactagaaataccatttgactcagccatcccagtactgcgtatatacccaaaggattataaatcatgctgctataaagacacatgcacacgtatgtttatagcggcactattcacaatagcaaagacttggaaccaacccaaatgtccaacaatgatagactggattaagaaaatgtggcacatatacaccatggaatactatgcagccataaaaaatgatgagttcatgtcctttgtagggacatggatgaagctggaaaccattattctcagcaaactattgcaaggacaaaaaaccaaacaccacatgttctcactcataggtgggaactgaacaatgagaacacatggacacaggaaggggaacatcacacaccggggactcttgtggggtgggggtgcagcacaccaacatgacacatgtatacatatgtaacaaacctgcacgttgtgtacatgtatcctaaaacttaaatataataataataaaaaaaaaaacactgaccttgggagtcacagtggattttaatatcaacagatctacatatatatttaacttttctgggcctcggttcatttacctgaaacgtaaacataacactacctactctgtaactattgagagaattaaacaggttagcgtataataagcacttggtttccttctacctccctgtatgtgcatatgtacttaatgctgtcttttgtttgcagaaataatatcataatcatagacatgagttttaagcatttctagcagaagtgatagatttttttttttcaatctcctctgtaaacaaggtattatagatttgatgaagtgaaaggcagtttatggctgggggtcagaataaactgagcacagtaacaactagagaacagctaatacaagtggccggaaaatttgcatcttgaactgcataaattagtatccttattgcttgtgtaagccaagaaatggggcctataaggtgcactcaaaacaaggccatctgtttattttcggattttttcccctctttcagattataacacattaagatataatttaccctagagaattaaaaatgttaaaaaaaaaaaaacccataaactccaactctaagaatttgtgatagtcttgccacagaaatgacatagaatgaggcaggttagaaacaaaaaggctggaaccattcttactgatgtctctactgtctgtaagaacacaaaatgatggtgctgcctcttgaaatacttttagctcttctcctacttcacactgcataatctgaatgaataatgtccctaactgtggagctggtctttaacaaaggtaaatgttgcctggttcctttatttcaaacatctacctaggtctctacccctctgcacacctctggtcactgtctttatcttcctctagtatttttgttccaccgttaggaggaggtaggtaaagctgtgagggtaggaaaaagtctagatccagttgggacttgttaaggctcaggaaaggtgtttactacaggaatttttttttttttttttgagacagagttttgctcttgttgcccaggctggggtgcagtggtgcgatctcagctcactgcaacctccgcctcccaggttcaagggattcttgtgcctcagcctcctgaatagctgggattacagacgcacaccatcatgctcagctaattttttgtatttttagtaaagacggggtttcatcatgttgttcaggctggtctcaaactcctaacttcagatgatacacctgcctctcaccctcccaaagtgctgggattacaggcgtgagccactgcgcccagaacattttttagtaatgattaccacagggacagaataggatcataaaggaatagaatgcttttctatataatttacaatcttagtagtttttttaatctaaagttgtgctgtccaacatcgtagccacatatatttaaagttaatgagaagtaagtaaaaataattcagttcctcagtcacattaaccacatttcaagtgctcatgtgacatactgctggctacctgactagatggtgaggaattaaacatttccatcatcacagaaagttctcctggacagtgctgataagcaggtaagaatgaaaaacaaagtaatagcccataatttcttttaaagtaaaagatgtctcagtctaccattataatgataacttaccaaacagggaaatattctagtttttttttaaaatatatataacaactctgtgctagcttcctacttaagcagaaaagttggaaaaccagaagttggatttgttggtaacaaccgctttattttcagacagaatctctgatgaaaacatataattatatatgct

SEQ ID NO: 94570 - DNA, 920882 bp, Homo sapiens
  misc_feature (1)...(920882): n = A,T,C or G
gcatttcttctaaggcagttctggtggtataaactgtctcagcttttgtttgcctgggaagcctttatttctccttcatttctaaagaacaactttgctgaatatcagtagtcttaactggcacgatttctttttttttcttcagcactgtgaatatataatcccattttctcctggcttgtaaggtttccactgagaaataaactgctagccttattagaactcccctttgtgtgatatgcttattttctcttgctgctttcaggatcctccctttctctttaatttttgacagtttgattttaatgtgtcttggtgtagtctcatttggattgaatctgattggggacttttgaccttcccgtacaatgatatttatatctttcaccagattatattacatttttcaccaaaaccctgtctttactagaaatacaaaaattagctgggtgtggtggcaggtaactgtaatctcagctacttgggaggctgaggcaggagaattgcttgaacccaggaggcagaggttgcagtgagctgagattgcaccaccacactccagcctggatgacagagtgagatttcctctcaaaaacaaaaaatattttttctggccctttatcttttttctctccttcttgaaatggtataattcaaatattttctcttttgatgctttcccataaattctgtaagctttcttcattccttcaattttttttctgttttctcctcttatttacatattctcctcttatatatttgcaaataacctgtcttccagttcacagattctttttcttcatcaattttactattgatgctctctattgtattttttatttcattcactatgtttttcagctctaggatttgatttttaaagataattttaatctctattaaatttctcatttcatcatttattgttttcttgatttcattgaattatttctctgtatttccttcaagtttgccaagtttccttagaagaattattttgaattctttgtaaatcatttcatagatctcaatttctttaggattagttagtgctttatttccgttgtttggtggtgtcgtttccctgatttttcttgaaccttatcggtatgtattggtgtctgttaatttgaataaatagggacttattaaaatctttgcagacacactttatctggaaaaacttttaccagtcagtctgtctagagattctggcatgctttctggtgtggttcacaggtagagttactgctggatttcccagggaggctgccccagtgcccaggtctatggggttgtacctgcggtctgcatccactggggtggacatgttgattgagtccacgggggtggccctggagcctgtgttcatgagggtgttcctacagcctgtgtccatgggatcctgccccaatcctgggtctatagggactgacctgttactgctgtgtgctttgagcttcaatctgcaggggatgggcaggcactaagatggggctggaaactggtctggcactggggtggccctgtggctgagtctgcaggagcaggcctaggtcctgggtccactatggccagtctgtagcctgggtcggcaggtttggttctggagtctcagtccatgaggtctggcctaacattggggtctactggattctgagtctctgggttatatcctggagccaaggatcatgggtgttggcttggtacttgaagccatgaaagctagcctggagcttggggtctaccaggataggcctagacccaaggtctgctgaagcaggcccgaactgtgggttcactggtgtataggaccacagcagatggcctgggggtgtatttttgtgcatgtatagttgttcagattgatgtttctgcaggagtacaagcactggaaagtcttattcaccattttgctgacatccagatcctataaactttcttgaggggaaaaattccgtttaatcctattcttgcacktcacatgtagtaagaacctactatgttgagggctctgtgctgatctttggaaataaaaagtgaatgactaacacttccaaataaattatgtagatactctgccctaaaagaagaggtcatatctttgctccgtaagtgtgggctgcgcataatgacttcctctcagagaatacagtatgtaaaggggaggaaaaagagtaaatttacagtggagaaacctgacaaacattacctcagccaggcgattaagatcgtcatcaacagggacaaaccatgttgcctagtatatacccttgatataatgtaatgaaaatagaactttataatcttcttttccaaaatccatcactttatttttaccatgagaaaaatatcagacaaattactacagaggggcatcctacaaaatatctgactgggattcctcaaaactgtcatggtcataaaaaacaaagaaagtctgaggaagtgccacagccagaagcctaaaaagacatgatcactaaatatattgtggtctcctagatgggatccttaaacagaaagagcacattagtaaaagctaacaaaaagaaatctgataaactacggacctcagttaataatgtaccaataccagttcactaattgtagaaaatgtatcatactaaagaaagatgagaatagcaggagaaattgtgtgtgtgtgtgtgtgtgtgtatgtgtgtatgtgtgtatgcatgtatattgttctctatacagttggccattgaataacacaggattgaactacatggatacacttacatgcacattttctttcacctcaaccacccttgagacacaagacaaacgtttcctcttcctcttcagcttattcagcgtgaagatgaagaggatgaagacatttatgatgatttacttctacttaatgaataataaatatattttccttatgattttcataataaaattttcttttctctagactattgtttgaacacagtatataatacatatagcatacaaaatgtgtgttaattgttgatgttttgggaaggcttctggtcagcagtaggctattagtagtttttaaagagtcaaaagttatatgtggattttcaactttgcagggggtctgctctcctaacccctgtgttgttcaaggctcactgtactatcttctgaatttctctgtaaatctaaaactgttttgaaaaatagtctattaaaaaactacaaaaaatgtgaatgagttatctttgtcctcttagagctcagttgacaagagactaaaaccaggaaaaaattataatatagtgtcatatatgcaataatataggtttgaacagagaacatgccaacccaaccaaaacttttaagataaattatcttttcaactaaatcgtaatttaaaaatttgagtctctagtagcacgcagcatgtatcttactcaaagtcagcattcaaatgtctagcagaatgatgaggaagactgctcccatttgtgaaatgacctggacatgggatacttaaataattagacttaagtgaaggttaactatgcctggtatcaccaccctaaaaggtgaaaataagtttcaattcaaattttgccatatacatctttattacacaaaatctgttttagatacccagtgaaatcccaggggcatttccttttatgtgcttcagccatactttacatgaaaggtttcttgagagacaatagagggagaattttccccttaaagtcaatggtaggcaaacagaatcattaaaaaaaaaaaaaaaaaaaaatcagcctagacactaaagtaaggcctcgtctctaaaaaagttagtcccagatactacttgggaggctagaggatcacttgtgccccggtcaaggctagagtgagccctgatggtacagctgcactccagcctgggtgacagaacaagaccctgtctcaaaatacaaaacaaaacaaaacaaaacaaaaaacccccacaaaaaccaaaaccaaaacaaacaaacaaaaaaaaccctccaaaaacttaaaggctggacacttgaccatttcttaactccattttgaaaggtaaagggtgaaaggtcactagatagttatatctggcatatatacaaatcagaaatatctctacttgagtcaatatcatcaatttcatccatgaaatgagaacccattactacgattcgtcatgctaacgaacagaatcctcagtgtggatagaaagttaagcagaagctctagcaccaacagcctttggagtatctttattattttttatttttaaatttttatttaaagctagctgaccactcctgcagcgtgaattcctgattagagcaaagtgagggataaatctagccatcatacacttttatcctcctaagaatgctgaactattttaaaagtacagctaccataccactccttttctcgagttatcttgctgttatgaaattggtagtctggctttattcctgaggtttttgtttgtttgtttgaaatgggggtttcactttgttgcccagcgtggtctcgaattcctgggctcaagcaatcctccagcctcggcttcccaaagtactggggttataggcttgagctaccgggcctaggccctaatcctaaattttaatcttaactctgccactgtgagaccttgggcaaatcacactactcccatggatccgagttctctcctctaaaaatgagggtactgggttaggtctttcttgatctttccatccatataattaatctataagcttagctgtgttttagctgacgtagaggaaaaccataaatatgaaagcagagacaccagctttaattcgtttgatggtcaaattacatacaccataaatattagcctctttgagtgatcaactgttagctttagccaagtatgtttaggattacacttaaaaaaatattttattgttgtacacttcataaaggaatctacagctactagtgatgctagtatagacttcatttatagcagaaaaaaaatccccaaggtaagaatactaaccactgaaggagatcacctcgttaattctcggcccttctaactctgcttgccttctttcagggttggtttcagagcgaatggtcctctctgttcagccttaaaacgcggcatacctaagtcatgtttccaacagcagtcaccatattccctcacgtttcccatttgacaaaccccaaatgtagcatttttttctcttaaaattcccttgaatgattcttcaagctccacgcatctgtggggacgttccaggtaccgccccacaatgctacctcctctttaaaagaagtcgttcagctggggcgggctggcgctgcgtggcgcgcacctgagcggccggggctccccgagccacggggggcgcgagagggcgaggcagcggcctggcttctccccagcaccgttctctgtcacggccgccgcctgaccatcaccccgcgcctcgcgtgggcatgtctcgcttcagaaatcccaagtcgtcttaggttccctggtccttcccctgggggggaaaaaaaacgctggtgcagcccagagcccttttccgctccaccccgggatgtcctcgctgccctcccgcctcccgcgcgtccttcccagcgcgtcggccgcgcgcccaggtgttcccgcgtccgtaatcccctccggcccgcgcctcccggcccgccctgcgggtctccagcgcctgggcccgcgctctcgccgcgggtccttcctcctatccccacccagccccgcccagcctccgcggcgctggggctcccggccgagcctctcctcccacctccgtcccctacttccctccccaagaagtgctatttttagcaaattctccgcgcgccgccgcccgctcagctcgcagctcgcagccgcccgctgccgccctcccgagccccccccgcgcggcggcggcggcggcggcggcggcggcgcgtcccgcacatcgcgcagcgcgcaccgagccggccgcgccgcgcccgccgctctcgccgctttcgccgcggtctcctcctctagcgcccgccgcggccggtaaatctcggctggaggagcagcggcggcccccgagtcaactttcattccctttttgcttctgcctcaccattctcttctcctcctcgaaagatggctgtttggagaagggggagaagttaagaggtcgccagcgcggagcgaaggagggcgcgatagcctcagcaggagcgggcggaggtgagtggcaccacggcagagtccccggctggtgcttgaggaaagccctgggaattgggggccaccggtcctcaggatgcgccgcggtattcccttctcgggttccgcaggttaacagcatctcagtccggactctgatgccacttgccttgcatctcgcagcccggagaccggtgggtttaagggaaccttcgtcagaagttgggtgctaggtcatctttgtggcatgcagaccctgacatttggctaggcaaactgaggcgagcggtcggtggcgtgattctctcccgcccccaaacacacccagtttatgttggagccgagctatgaatgaaaagtttgtactggcaacgtgttgcttgaggggagcaacgcttattggggggtacctttgatgtttcgtggaggacttcagttttaagtcaatacatcagaatcctgggttttaagaaaagttcaggaggctgggggatgggatgggagataaagcagttccttgactagtggaaggagagtgatgaatcgtaagcttattaaggtaaactggttaattagatgccatacgagggtgtcacagtggggactagagggaacggaggacgggggcgttccctgagcgcctagcaggctgcgtttgtttggctttgaagccgttayccccttgtccgcaatgagaggtgctggtgtcaggcctgtgtgtctgtgatgtgacagagcgggactgagctctctccagatccgaggcgcggttgtcaggagaggtggcctgcaacggagagctgaggatgcagttcctgtgatgtggacttggagaattctctagtgagtctcctgtgctccaatttcaggaagatctgtcaattgttttttcttccagggaggtgtgtgtaatctcctaaaaggaactttcagctttaagtaactgtagcattttgaaatcctataagaaatgagatatctacatatattcattatttcatgtatgtggggtgtgtatgtgtgtgtgtaaaatatgggaaaggggtaagaaaggcttaaaaagtttaacttctaccagaaaagaaagcgaagagttaatttttttctccccaaatggtataacaatgcatatacaactaaatactcttgctgtgctgagatttctcataaggagtaagatttaggaattacaagtattcagagcactgtcatgttttcaaatcttgcaggcactgtcgaaatctggaaaaagggagtacgtacatagaaaacccatattaaaggaaaaaaacattgaaaatctcccaaaagaaaaccttatgacatttgaaaaggcctggatgttttctgatgccccagaaatctttctaatcctgtaattaaaaacagcacagaataagttgcatttaagaaatcagcaatcatgtttaaargatatcttttgaccttctttttcgtacttttgatttttattatggaaattattgtgactgaaaatttgttgtttaatatatttgccttttaccacagataattagtcttccttatccttttaaaccactgttccagtttggaccaatttaattccccaaacatcaaattactgatgttccttctggaaaccatttatgtttaaaatggctaataagaatattatatttccaaaacaacataatttagtcagttgtaaaacttgcttgtaatttattctcatccattttgtttgaatggggcacatttgaagaagagcagcattttcttagaatatgccattttctgtgtgggaaaaagctagtgttttcatatatgttttagctattaaacagatgcatgtaaggtggcaatcctgtctgacctttgataaactgccagccagagggagagagatgctttcttagctgtgctagtgaattgataatctttactacaaaatggacacggttagatgcacataaggttgtgcagaaggaagttaaggagttttaaattaaataccagtttatgggtaggagacagatttttttttttaaccttgatcttcctgtttctttctttctgcagttcagcctgttgggctggcctttattggagagtcagaccagcactctgactagagagtgtttagcacattaaagtgctgtcttttgtagaaataatgatggctcttttgcaattaaaaggtaattttatacatgcttatagatttttgtgattgtttggtgaccaaattaagcataaccgttattatggtagaaagagttgttttatgaagttattgccactatatataaataattatatatttaagatatagatgaattctatttgaggtttaggagttttgaatcttaaggccagctgaccagatataaacctatttaattaactaatttgaatgacaccagaattcagatttttattaatatctacatctaggtttatgtagctttcctttctttttattagaattacttcttttttgaatttgtttaaatattacaacatattacattataatttgtacacactcagtggggaaggtgcaggttattcttaaatagagatgtggagaaatagctaacaaggagagtcatttgagaaacatatggacatcataaaatccttctgtatgtagcatctgtaccttctcattagtgaaatattgtagttatggacattttttgttattacatccaaatgtggctttttatttttgcttcattggtttttttttgtttgttttaaaatacaatttgtattactgtttaagttggtgggggctcttactgcttgaagccttttgctttcaatagacatcatacttaatttttattgcatgcatctgcagatatatacaattgtttcccagtttgttattataattcttacactttttggtgattcctcaaaacatttgagagataagtagggtgacatattgttctcattttaggaaggaggcggcaggtacactgatatacccaacgttacaccatagtgaatcagtgtgaagctgagcttaacatctatatttcctgtattttaattatgagagcaagctgctcctgtgtcttatgataacttcataaatttatgtatttctagatttttaaagtggtcatctttatayatgtgcagatcagattttaaatcagtcaatatagtcataaggggatggatcatactgttggccwgttgatgggagagaaccatgactctaatagctactgctgaaataaacaaagaagcacacacacctctgcagaatatttgttcttgcaatcaatccatagtccacatatttctctgccctgctggcctcaccctatcaactacctactgcccttttactgatcaaagcagttcttaaagtttatcagcacagttgtcaagcttgaggatcatcagcctcactggcaagaaaagtcagaacctgatttttgggaagagagagtattgacgggggacagtaatggagtgttcactccagaggcagccagtartggtcagagatcatattctgggtgtcgggatgtctatttctctcatcagctctgcttctttggccgaacttacaggtatcaaagtgaacagaaggtttatggaattatctagtcatttctttccatgtagatctcatatctgaataaatcagactttttttaaaaaaaagaaaaggacagaaacttgttctttttcttcatctcaccaaatctcctctccttcaaatcccactagaatttttttaggataattgcccacatgatttgtaacactaaagtgatagacttctgatattgcattattacacttaacagtggaatatattatccagcttgcagaaggaagcattgtaattctgtagataatggtaatatgtaatcttatgcaagtatttttgaataagcagacagtaccaagagctctccattaagctaatatgtatattcttactcttccattccctaaattacaaatggtttataggagctcatccaaatcattaagtatcaagtactgaaaaaaagttcagatgtggtttcctgtttactatggtgaattttgtttagagcttcaaagagaggaaaactactatctattgtttgctgcaccagagagagtataacgtgtttctggtgagcttgaggagcattgaggttgctggaaatggtactttcttcacatctctacagaagctgtgataagaaggagatgggtgtggactggtttagttctagtacagtagtgatgactggaatttgaagtgaccactgaaagggtaagatttggatagtctgtgtgtcactcaaggtattcagtagcaagtcatggaaactaacttagttaatataagcatcaaataaatttattagaggatattgactttgttttctcttgctgtgtaacacatttccacaaatttagcagcttaacacaacacccctttatcatatcagtttcattgctcagaagtccacacatagctcaactaggtcctctggccagagatcttctcccatgttggctagggctgcaatcccaacagaagatcaataggaaaagatccactttcaagctcttttctattattggcagaatttatctcatagtggctgtaggactgaggcctccattttcttgctggctgtcattcagaggctgcccttaactcttagaggctgctgttattctttgccatgtggccctctcataggtactgttacaacatggcatcttacttttttaaagctagcaaggaagtctctcttgctccagtctgataagaaagagtcttatatactataatataatagtgagagagtgacatcaggctatacaagggcatgactccttggaggtcagcttagggtatgtccaccacattgactagctcatagaatctctggtgtagggtgggcacagtggcttatgccggtaatcccagcactttggcaggccaaggcagatgaactgcttgagtccaggagttcaagatcagcctgggcaacatggcgcgaccctgttgctacaaaaaaatgcagaaaaaattacctgaacgtgatggtgtgtgcctgaagtcccagctagttggcaggctgaggtgggaggatcacctgagtctgggaatttgaggctacagtaagccatgatcgtgccaccatgctccagcctgggcaacacagtaagaccctatttttctttctttctttttttttttttaaaaaaaagaacctctggtaaagtcagcagacctgactttgaagccactcaagtagaaacaaggctccaaatccctctgcagaatttgtcctgtgaggtactgctgctgtcgctgctggcatatagcttctacagttgaatgtgggctctatatcataaaagagaggattctccacatataataatggggtcccattgtccattgccaaaaagaatgacaggtgtccactgctgagggaaagaagaaaaaatgattgcttaatgaaatgtttgagtttttggccaggataggcatgatagccttctagggatgggattgaattggaaagtgactgaagtcatgatgacttcttggaagagaaaactcttccaggatttaggagaataatggtaatgagggtccatttatgagtggtagtgataagaaaggagtagaaaacctttgaaagatgaatcactacacatacattagtctgggtattgacttaattagtccctaaatatattccacgcatgaaagacttttaagggactgattccactaatccttgcagggaaccagcgctgtgacttggaggcctgcagtgtggtctaccctcattttatagaaaggagtagagctaaggaccattgtactatatttgtggcccagtgactatagggtgctatgtagtgggttggggactattgaacacaccctgtgctctaagcactttgccagacacattttatctattttgtatctcaaactctggcagtttagtttatatttccctagttctgcctcccttctcccctggcaggtgtgtggagactttgaaaggctaaatactttgccaagggtcgttcagctaggggtggcattaggatttgaatccaggtctgattccagagcctgaagtcttgtagtacacatcccatactcacaagcagtaagtgaagtttccagggggaaagcctgttactcacattgaagtggatgtcagtgctacaattgctgttgggttccatcattcagcttgagagaactggatactgcaagatgagggttaaagagaggagtgagagagtgtgctgtatcatgccttcttttattttctcagcaggaagtacatattataggtctctcttagatctaaaagtaagaatggggagtagaggctgtgcatttttatttctacttatcattttggttaaaatcaaaagcactgtgtctcctttctttcctatatgtagatttctactattaaattaaatcaggtaacattatgaattctcattgcctctttggccatagggttctttctatagctttttcagtagatgccactgttttgatcttgaaaagtctattgagacattcttcctttgttcttctattactcagtccctctttctactctgtggtgcctctgaaatctattcatagatattctacttttttcttctgttttatgtacttaaatatcttctttaaatggatctagttccattgatcagaatcattggcccagatccccttgctgctccactgtacccaggaagtcttatctattttctgttaattttactgagttttactctacatcccagcacagtatgaggaagcctttaagatttccctgggtatctgagcctaaatgtaaacatttaaaactgaatacctcaaggaagagtatgattggattgtgttagatcaggtgcacacctatggactactccactgtggccaggcaaagggagttttattattgctccatctgggttcaggtgtccacccttctagaatactactgttctcaaagaaggaaattgtgagccagccccagcttgactggggtcaacagtactaatctattctagagcacactgtagctcaggaagtctctaaataaacttaatttcttcatataggttttagatttcctaaactagattaggccagatttgactttaaaagcccaaacttcttagcatgacacaagttctttcacagcctggacccagcctatctttgttacctttacttttttttttttttttttaggtgcagggtcttgctctactcccaaggctggtgtgatcacagctcagtataaccttgagctcctaggctcaagtgatccttctgtgtcagcctcccaagtagctaggactcacaggctcatgccagcgtacctggctaattaaaaaaaattatttattgtttatttttaaacattttttgtggaaggggtcttgctgtattgcccagagtggtcttgtactcctggcctcaagctatcctcctgcttaggcctcccaaagcactaggattacaaatgtgagccaccgtgccaggcccttacatttttaactgttgcaactccctgcctttcatccagtaaatcattaaggatttcaatcctaaacttggagctagcaagtggcttcgattttagataaacaggaatagccagcctgagagaatacatcgacgtgtaaagaaaagtcaagatgagagagagagaaataagtacatttcagtttttcacttcctgcatccagtcattcttaagtctcgttctatagctgattttttccamggatatgttatgtgagcaatgaattatccataaattgagtttctgcctcttgcaatggaaagagaaccgtgtagcataggtttctataagtgatcatctcgtagcgaaaatcagactttcattctgctggggttctgttgggggattaggaagctgtgcttctctgccctactttttcactgggcccagtgtatgtcccacctcttctgtgatgcttcccctgattactacaacacactgagatctcattcctcyctgaattcctactgtagtttagggttatggctatgttttcgcaggcttacaaatggaattctagtattaatkgagaaaatccataataaaaargctactgtattaggaaagtctttaaaaggaatttgcatttttattaccccaaacagcatccttatatttttgaaatatagtagtatatttaatatacaggaggatttacatgtgtatttatggtcttcttgcaattaccctgtggctcgctagagattcatagtctcccaccacttagatggaaaagagggcagagaaggtttggcttcctaatgggtaccttctccaaataaaacaccacaggaagaatgggccggttttgactaagactacaggtctgtacagtatgagtgtgtttattttttattaaacattctacttaggtatataggaacataaatatgaatgcttttgcttatagatttcataaattataaaaccaaacccaacaaacaaatgttgaatataaacaacagaattgatgaaattaaaagaaacaacattgaactctgtgacaaatgatgctgtattgttgaaattacattgccagtatccagtttaaaagtataaagatgcagtctcagattctgtttttctttaatctatttctatgttttatatcaatatagatacaaaaattgtccttttacaaccaaacaaacaatgttaactttgaggctttgtgtatggctcaggataatcaggctttacacatgatcaaaattcctcaaataatccctcaaatgtcaggtttaatgaggtatcacctgagatctctataacatcttttcgttcccttgaaaatgtgattagtattgtggagtcatcgaattctaaatcaaatctgtaagctgtattccaagatttctggaatggagaacagattatgtagaagctacacagagataggatgcatgcattatcttcacactcatgatgattataacctctatagtacaggtacttttgcctgcctgtgctacccagtgttctgtaatgactcacttcatcctcaccttttctctaaacagactttatttgtttagcaacctttctattctttggtctccacttagtttatgcatgattcaaaacaccaagtgcaaacaacatgatgaaaatttggtggcagtatttagtttttaaacgtttattcagaaactgattagcatacaacatgtatatttagatgatcatcccaatgaaatcccaaaatggaaaaaaaaatatttcacatcaagctcatggacctcagtttgaaatacacagttgcaaatgttaattggccacttaaaacattttacatcttgccttatgttgtgtgtcattaatgaaattgtaagctccttgaggtgagactatatgcttactgttttgttttcttccatagcactgtgtgcatttgttatagttggtgaccaaaaagtgtttgctgattgaccgattattaatatattgttatttcctattgctctgtgactcaaaggcagggactattttgttttaatctgtggtctctgaatgcgtagcacagcaactctcacatgagaagtgcctaataaatgttctgaatgaaagaatggatgacttgttggctttgtgtgtgtgtgtgtgtgtgtgtgtgtgtgtgtgtgtgtattcgtactcttttagatctaatctcttatgtacagggcacttctaacagttgtatagattagtgctgtccagtaagattttctgtgatgatggaaatattctatgtctatgctctgcaacatcatagccactaggcacatgtggtctttgaaatttagcaaatgtggccaatggcctgaattgagttttatttagttttaatgagtgcatagtcacacatggctagtgggcagcacagacccaaatgataaaatgtactttctcaaacttatttgctctcatatctaacattattatattttttggttataattggatgttgttatttgattttgttgtattggatggatgaagtgagtttatcactttaaaaatagggcaatatagtccaccaagttgacttcattctttcctaaatgaccagcaacattggatgtcatctgttcacttgccccaccatctattttggtatttcatcatttccttattaggctagaggcctgacaccgctttaccaaataagttttatgtacacttttaccttttttttttttttttaatgacccaggttatcttgcgtttgcttgtctttctgttttagtccttttttcccctaataaaccatttaaacttggattatctatatcattattatcatttttagagacaaggtcttgctctgtcacacaggctakaatgcagcagtgtgatcatagctcactgcagccttgaactcctgggctcagctgatcctcctgcctcagcttcccaaggagctgggactacaggcatataccaccacacctggctaattttttattagattttttcttttttagagatggaatcttgctttgttgaccaggctggtcttgaacttctggcctcaagtgatcctctggagtaactgagattataggagtggaccactgcacccagcctatattatcattgttaataccaccatcatcattttcatttctggtgtttatgctttgccagcccatatttgatgttgtgtactaacgtctactgatagtctaaacacatttcaaatttattataatctgaaaaatgtctgaatattctttttctccaattgttttctttgcttatcttgcccttttaccctttctggtccagaagaatgaactagcaccatatgcatttaaacattacaactcagtccttacataagatgtaatcccatcatgacaagtttcactgctgttgccaaatccgtgaaatcgatactacaggactgtcatttagaaagacaggaattgcttcctgcaaatggctgagatctttatgcaatttgtagttctgctggagcaagacttctaagttattgtacatatattgaacctcagtattgggtatattcaattctcctttaattcttataacagtattgaatctagtagtatgtaatggttatagaggctatctatgcaaataagttgaaatcagctctgctgactagcagaaatactttagaattttccactcattttctgtttactgctagagatttaattgttgtcttatgtggcagaatttgaatgcacagacttcagcatggaagcttgccttttgttcatttttttagtctagcttagtagttcccaaacttgagtgtgcatcagcatttctgttcagggcgatacacacaaaagattgttaactatactttatggatgagttaacctcttttcaaggcagttttgtctatactagattttcatcttggaacctacctttccctcattaccccaaagatgcatctcctctttattccttctatttctactttcagtccagcacacagctgctcattgagtggacttgtagatgtgctcttgaatagatttcacacaatgggagacaaattcagtagcaatatatagaattttgaacttgtgaatccccggttgagcttttatcttcttattgctttcatatgcctctctatggtgagaagctagtactgctttgttatcttctttcccaatttttccccataaacattctcctaaaaagccctaatgatgtaaatgatacattatgttcattcttgacaggttggggaaatgaggaagggaactttcctttgtgacttgtgctgtagatatattttaaaatctcctatttatctatttgacccaatttttaaaagttacctacattaaaataaatattaaataaatttagtattataatgaaacagtagtttgcttttatttataaagttcatctgggtgtgttggctcacgcctgtaatcccagcactttgggaggccgaggcaggtgtgtcacctgaggttgagagttcgacaccaacctggccaacatggtgaaatcctgtttctactaaaaatacaaaaaagaaaaaattagctgggtgcggtggtgggcacctgtaatcccagctacttgggaggctgaggcaggagaatcgtttggaccctggaggtggaggttgcagtgaactgagattgcatcactgcactccagcctgggcgacagagtgagactctgtctcaaaaaaataaagaaaaaaaaataaagttcatcaaaggcctttgcttaaacttatgagataacttgtttactaaccagaacacccttttggagttacttactgcttttctctgtgagaacaaacatcatatattcaccttaacttatattttcaaaagtataatgctaagactactcaagccaagtgggaaagtgtaggccaaatggaatagtatttcagaataacggctacagttttaatttctctagaatagcagatctgaaatattgttgtgtgttctaattttcaggtaactactggaaactcattaaaatatattttataccctattctatttttcttacatatgttataaagcccttactacattcgtattttattaaaacagtaattatttaaagatatttatgtaaaacagaaatcttttgtatttactcgagtagttaccatttcagtgctctttattcctttgtctatatccagattttcctctgatatcctcttccttctgcctgacttcctttaaacattccttgtggcacagatctgctggtgatgaatcctatcagcttgcttttgtatttctgaaaatgtcttatttcaccttatttttgttggatatagaattctaggtcagtttttttcttttaatagtttaaagatgttacttcactgttttatcatttgcatttttttttacaagaaacctgctgtcattcttacttttgttctcctttatagatatcaagtcctataacgtattctgtttattcctggttttgaacaatttgattttaatgtatcttggtatagctttcttcatgtttcttgtgctttgggttcattgagcttcttgggcctgagggttaatagtttccatcaaatttgaaaaaaaagttagtcattatttcttcagaatttttttaggagtccctcctcttttttctcttattcaggaactccagttgcatgtatattaggatcactgatgctctgtttgtttatttttattttttcttctccatatgttacattttgagtagtttctattgctgtgtcttcaagttcattaccaagtagtcatatttagtgtgttctccatctcacacattgtagttttcatctcttgaagttcaatggggtgtttcacaattttccatgtccctatttaactttctggacatatggaatagattcataataactgttttaatgaccttgtttgcaaattctaatgtcttttttagttcttggtcaattttgtttgatwgactttttatccttgctattggttatattttcctatatctttgcatgcctagtaatttttgatggatgccagacatcgtgaattgtagggtgctggatatttttatattcctataaatcttcttgagtattttttttctgggatgcaattagttactgggaaacagcttgatcctttcaggtcttgtttttaagattagtttctgagtactctacccaacaccccatgaattatgaagttttccagtctggctggtaggaataggcacaattcccagacttgtgtgagtgctgggtactgttcccattaacactttcaggtggttcttttcctaactttgggttgttttctcacatctgtgtcctgatcattacactgctgaatattcaaggggggagctcatttgtagacctctgaatatctcttcatatttagctttcccccctccagtactctggcctgtgacatccagctgctctgatctccttagttcctccaattcatctcctcaattcagggattattctaggctctgcctgggttttcctttcctgggccacaatctggaagctggactagtcatagagcccaggtcatcagtttcccatttcttagggttcacctcgtgtgttttctgtttstcaaggattattgcattgtgtccagtgtcttgaaaactattgcttcatattttgtacagaacttttattttcttaggcagggggataattccaatccctcttactcagtcttctttggaagtggttcccccattccttttctcttccatgtaaaaccttgttggtcaatatcattttggcgactacttaagtatttaatgctcaatttaatgtagtttattttgatattctacatctttcttttcagcagtttccaaattttctttaattaacattttatattacaagcatattttaaaaaatccattttgcacagttatattctatatcatgcttgatgcttttatcactgtcctagccattcaaaaccattcttaaggcaagctggtcataaaataaggagttaaatttgttgagcataataatttacatgcttttaagtggataaaagatgccactatgggaaagtaccatgttttttaaggatagaagccaagtggctttgaaataatgtactcttgaatctagtaaatgtgaatgatcataaaacagctcataaattactatattttaaattggatcacttatggattgctcctcttttatatttattcaggaggttctgtagttcatggataggccttgagattgttcatatgtcaagcaatagtgaactatgtgctggtgaattattttatttttaatcctctctcatatttgaatgataaaatatactactgtgaactaatatgagaataaagtgtcaaaattcaggagcacatcttgctatagtgaatacatcttgttacttcaagagttttctggcagtaagggcacaattgactgtgataatttaaaagaatccttgaggtggtatagttccatatgtcgtaggaatatgtcaatgattttttaattttgcaatttgagtttttaatgtagtcttttgaaagctagttgttaagcatggcaagaagactagagttactttagaattcttaggaaaataattttgtaagaacaaattaaaattaactttttcttcagcactgtcataaatatcagcaccatgaagccaaaattgtggcartgttacatggctatgtttccaatatttaagaataaaggttaggccagatttatattctcttgcaaaattgaaccaaaatataaataatttatagaattttaagaatagaatcttgaaaaagcgaatactactctgtgagggagactgttagttgtctcctagtctctcttttccccactgtcctcagacataaagcacctaagttttagctggggacaaatccctacaggatagagatgacatttcttagccttccttgcagctaagaattttaaaccatgtgacaaagttctgaccacaggatataaacagaatggttatgtgcaacttccaagtaggccattaaaggacggggtgtgctgtctcctttcccttctcatttgctggaatgtgggaataatggttgcctatcttagactttgctaaggatgccagcactttaagaatggcagagcaacaagatttttaaagaaggcctaggacagtgtattaatctgttctcacactgctaataaagacatacccgagactgggtaatttataaaggaatgaggtttaagggactcacagttccacattgcgggggaggcctcacaatcatggtggaaggcaaaggagcaaaggcacatcttacatagtggcaggcaagagagcttgtgcaggggaactcctatttataaaaccatcagatctcatgagacttgttcactaccatgggaacagtatgggggacaccaaccacatgattcaattatctccacctggctccatccttacacatggggattattacaattcagggtgagatttggttggggacacagccaaaccatatcagactgtgatagtgacatttttactttattattttattttattttatattcgggggatacatatgcaagtttgttacaagggtatattgtgtgatgctgaggtttgggcatctrtcgatcccatcactcaaatagtgaacatagtacccaataggaggtttttcagccctttgcgccatctctctggctcctcccttttggagtccccggtgcctattgttcatagatgatgacttcttgaagcagagttgccataacagcttggagtcttgtctaactaagccactgttattttcagtctctgtcacgtacagccaaagctatatgcagtaagtcctcacttatcgttatggataggttcttggaatctgcgaccttaagtgaaatgacgtacaaggaaaccactgttaccacaggctaattgatataaacargagttaagctcctatggcatatttctggtcacaaaaatatcaccaaacttctacataaagatcgaaatatttctaatataaaacatcggaataaatgtgagctatacatacatttaagaaagattcctaaaaacaagtctgaaaattgtttacccacttacaccaattcatggtcttgggtggccagagccgatcccagcagttcagggcaccagttgggaaccagccccggacaggatgccatcccatctcagggaacactcatacccacccacattcagaccgagactgtgtagacacgctgattcacctaacatgcacagctttgggatgtgggaggaaaccggagtacccagagaaaacccgtgcagacaaggggagcatgtgcaaactctatgcacacagtggcccgggctaggaagtcattttttcttttatcaactttataatgaaacaaatgaaatgacattatttgagaacctgctgtacattgttcccataattgtatttttttttgtttataagacacattaagggtttctttttgtaaccataagcttgaaaggaccaagtgatcatacatcatagagatctaaactttttcaaaggccttcatttttttaaaaccagactatttcaatatctatcagctgaggtgaggaacacaatataattaaacttacctggctcttgtctgagaaatttaaaaaaagatttgaggcacttaaatccttatgctgacttttgaaaaaaacaagggttgggaaaagagagaatgctaagttgttcagctttctactttgcccgcagacaccaaatattttttcaattttcagttcccagtgtgaaaagactccctataccatttcacactgtttactactcccccttttggaaatgatcatcccagagcttctgggatatcatactctccagtttcctcctctgcctctgctctctccttgtctcctttttgggaccctatttaattcactccctcagtgtgggcatattctgattcttggctcacttttccctttactctgtaagggagatcacaaattggcagcttatagacatgttttgttgatgccacacagaattcaaagtaatttaaattttgaattaatcttttctaaaggctatttccttttcctccccctttgttttcaattccatttcctccttcagatcatttctactattatcttaatcagacaatcatgttgtcttacctggcttccttgcaatagaattctaaccaatattacttttggaatagcctttctaaaatgaaattttaatatttttctatctagcctcaaaactttgatcagctcatctgctttctagatgagatttcatctacatctagatgctttctagatgtggatttcatctacatctaggatgctttctagatgtggatttcatctacatctaggatgctttctagatgtggatttcatctacatctaggatgctttctagatgtggatttcatctacatctaggatgctttctagatgtggatttcatctacatctaggatgctttctagatgtggatttcatctacatctagatgctttctagatgtagatttcaaactctggtgttggtatgaatgcaaaatgggcacagccacttcagaaaacaattttggtagttcctcaaaaagctaaccagagagttactatattagctaggtatacacccaaaagaattgaaaacatatttccagacaaaaatgtatatatgattattcatgtccatttataatagccagaaagtggaaacaacccaaatgtttaccacctggtgaatagataaacaaaatgtggtgtagttgcacaatggcatattactaggtaatcaaaaaggaatgaagcagtgatttatgctacacctgggtgaaccttgaaaacattatgctaagtgaaagaagccagacttacaaggccacatgctattttattcaatttataggaaatagccaaagactaaaggtagaatagtggttgcctgaggcaaagggaagggggaatgagatgtgactgctaaaggatatagggtttctttctgtggcaatgaaaattttctggaattagatggggctgatggctgtatacctctgtgaatataataaaaatcactgaattatatagattaaaagggtaaatttttaggtatgtgaatgatacctcagaaaaagtcagggaacgcagtgaaaaacaaaacaaaaaccgaaagctccttagaactcaagatccttcatgatctgacctttgctggttttcccagtctcatttctgggtactttgtctttccatatccattgcctgtctgttcctctctcccttgcactagtctgctaatctacaaactcttccaagagttccatgctgtctatgagtcttattatccatgcacacatttctttttttttttgagatggagtcccactctgtctcccaggctggagtgcagtggtgcgatcttagctcactgcaacctccgcctcccaggttcaagtgattctcctgcctcagcctcctgagtagctgagattacaggcacactctacgacacctggctaattttttatatttttggtaaagatrgggtttcaccatgttagccaggctggtcttgaactcctaacctcaaatgatctgcctgctgcagcctcccagtgtgctgggattacaggcgtgagccaccgtggctggccctgtgtacacatttctaccagaaaagtccttcccactctcttctcctcacattcatctcttaaattcctgattttcttttgagttcatatttcacctctcctggaatccctttttatacaccagtgctggaatacttaatagggggattatgtagactcttcagggcaggcaggagtaccctacaaatgaaaataaattaactttgatgagcttataccacctttgcaatcagaaaatcttgaaagaagcttttttgagtgtgcatgtaagtgttatgtttcatagtttttaaactttaaataaaatgtagtggactgggtatgcaactatgatattttagaacaagcatcatgtcacaatattaatctggctttgctgccccctctcccctgccctgtgtagattaggagcaaacctagggtgtttgcgcttcccaaatactctgggcatcccttgctaccctaaatggtaaatatccgtttctttttctgtctctccatctagactgggagctgcttagtgataactsctttgtctttcattaaaaaaatctttacaactaaattccagtaattctccatagaaagtgtttggtaagttttgaacaaatgattagacatcctttgtggtcaaatgtaggcatgtgagagagactactagcatttgccctactgaagatcagagatctgaggacattttaagaaatgcctaattagatggcttcattgaaatacaacttgatctctttcttgctctctctctctctctctcacacgcacacacacacacagacagacacctcctttaaaaagctaattcaaaaagagtagaagcaaaaaagtgagatttaaaactttttctcaacctatacacctgaggaaggtgttagatttaaggcctaaagtggattttaaactgacacctcccctaacatatttttaaagtgttttctgtactttttaaaacagcttttctttttcatgtcagcaaattcatgagttaacattcatgtactaacattaactcccattttggacttgctcattatgcagtggtaratagtggctggttaatgttttctctttcaaaaatgtgattatacttagttatttataagtaattcccccttttttacctttcatttttaaaactagaaattcttgtttcgaccctatatgtcttatttgggttctctgaatcagattcttagacaaagatttgagtgcaggtagtttactaaggaggcattcagtaaactgtttgtattaagcaagttactgacttgagcaactgaaattttaattctttcgggggacctgtgaaaaatatgcctacaattagctacatgagaagcaagggagttgggatatgatatcctagaacctgttagtccttagttgagggctcttctagggggtgttaatacccagagtttccaactgcagtgcaggtccagagaaaaccctcaggtaaagaaataaaagggttgacggttggaagtctgtgggcacagattcaagtagcaatgaccagggagtgtggggcagtaccaacagcgttcactgtatatggagatgggcgccatcatgggaggagtgctcaagtgtgaaaaagcccagaatttaagttagtttttctcaagcatttactcagtcctcaggtaagtacctactgtgtgtaaaggctgtactaggtaatgggatgtatgaattcgcttgtagaggcaattagctgtttaaagctcagtttctttatttcaaatgagaacttattttctttctttcaaaatggagaatcaaatgagatcgtattcctgaacatactttaaaatgttgagagcattttacactcatctccttttttttttttttttttttggatatggagtctcactcttgcccaggctggagtggcagtgttgtgattttggcacactgtaacctctgcctcctgcctcccagattcaagcgattctcctgcctcagcttcctgagtagctaggattacaggcgcgtgccaccacacccagctaatttttgtatttttagtagagacagagtttcaccatgttggtcaggttggtctcgaactcctgacctcatgatcctccctcctcggcctcccaaagtgttggattacaggtgtgagccactgcgcctggccacactcgtctcttatcaggaatatgttagccagtcaaaagcttgttttcttcttaggccatgtgaatttggcctctctgcgaaacatgtataagacagtaaatttaaaagtttcatgaaaggaataaggtaccatggggatggttatttttagccagttggcagtgaagacttcctggggaaagtggataaaatggaccttaaagtaatggataggaattatccatgtggaaacagggaatttctgaaggaacagtgaattccaggagagcttgagcaaagccctagaggcagtgcaactgagaaccactcagtacccaggttaagcattttttcccccttaactacaaattgaggatattagtactacctacactataagattgttgtaaggatatcttgtaaggataaatgagctatgtcatgtaaggtaggtaggttagggtaaattctaacttcatctgtagcttttggtgtcagtgtagtttctgatgataagttatccagtcccaaagaaagcagtgtttcctaaagtagatgggatgtaaaccccacaacatctgcaagaaaaaaggattatgacattaaaagaatttgagaaatcctgtgtaccatacatagatggatttcatagagaggcacattaagatattaacagtgctgagaagtgcagcaataaataaacctttttttttttactttgtttaatgctgtgtattaaatttctttaattgctggtttcttttctccccttaatgtaatacttattcatgttggacattctttgtaaaatgtgaatttgaagagcttcatgtggtgcgccaaccaagttaccagtacttacatatccactttaatgttgttaatctatcttaaggagttgtaaatggcttgaaataataagaaactttgcttaaaatactttttgtgattctccctctaggcatgcttctgagcagtttcttagtcattgcccccacatcaatcattgtatggtgctttacatatttcattcctcattttctgcacagaattgtattgctcaccccatgatttctcccaggcctcagatctgctcagaatgatgtttttttggcctcacttgagataatttaaagaacattccccagacaattctgaaagttgacttccaaaaatacttggagtaatgccatcatcattaaactaagtggatgactttcaaggtgagtggttttaaaagggacagcagcttcttggacgtgcactttctctgcagaacaaatggtttgtctttttatagtcatagaaggagctctgaattcctactatgtgtttgtccttttggtagatatagtctattttgggcagaagttcatagtctactggggtaaaaaataaatgttcaaaagtaaccactgtagaagaggatagatatagtcataaaagctacagagtgttatcaaagtacagaggaggggtcttycataggggtcaagaaaagtggcaaggatacttacgatgaaccttgaataccacatgaacaatagagatattccaggcagagagaagtaatgtgcagaggcccagagatgtgacaaaggacaaggaactccatgtaagtgcaaatggagtgtagactccacatgggaatatggatggtgagtgaggctgggaagccagatggagtcctgactataaagggctgtgtaagtgctggggtaaagagtttggagtttagcctctagatggtagagcacacctgatagattattagacagagatggccatagtcacaattttaagcaatttggtaagtggcaactatgcagttgagttggagtgaggaaagacgggggccaggagcttgggaggctattacagcggtccagccaacggggagtctaaactraggtagtaattgtgatgatggggaagacaaaatggatatgatagatatttaaaagatgaggaacggagatgataaggggagtctgggattctttcacatggggaagagtttggatgttggtataggtcagtgtaattagaattcaggagagaaacacattttaagggacatttgctgagttgtattctgtatttgttgtgtttgaagtgcttatgggttattcatttgtattttcatcagttcctagagtaagtactctgtgccaaacaatgtgtttgactctgaggatgtggcaagaaaagagtcagaatgttccatgtgcctgtgaagcttacagcttagtgggagagacagacgtaaataattacccaactaattacttcattagtaagtatagaagaaggggacctaactcataaggaagtcttctgtccattctggaacttagcaaaatagtttggtctgcaaagtgacagagatttgaggatgattggtgagtagttgctaactgaagtcattagtgagattgcccagactaggtttgcaaaacaggcagaaaaggaggcctaggttagaatgtgaatatttaaggagaaagttagataaagtcctaaaatgaagctggaaaagagtggcagagtatcactgcccctcggtatctgtggtggattggttccagcgactcccttggataccaatatcagtggatgcccaagtctcttgggtaaaagggtatagtgtttgcatataatccatactgtatactttaaatcgtctctatattactaataatacctaattcagtataaatgctatgtaagtagttggtatactgtattgtttttcaacttgtatttttatattgttattgcttatttatttatttttaaaaaatattttgcatttgcaattgaatttggggatgtggaatccatagatacggagggccaattgtaatttaaaggtgtatggaaagggttgggaatgttgccaagaggtcacataaagtaaatgtaagaggtgccatgggctttgaaactgcagttccatgctggctctagcaagagcaggtgcagtagagtggtgtatgtacaagctgtatttcctgccagtggtgtgctagatctagcttatgctgccttgagagagctggattgttaaattttcaggaattatgcaagctggttkttaaaatagccattagtaaaaattaaagtatgtacacttacaattaaattgtattagaatagatgtagtaaaaatattaaagctcatcctccctaattattttacaacatttttctattatctatgctcttaaggttatttatgtctattattttcctgaatgggtggatgtactatacaatggtgtactaccgcacatttcttttcaagtctatgtttattgactcttgttggcatattgaaattagccaaagtgagagtatttacaccgtggaaattggcaaataaatgccacaaatcggagattttgttttgttgattttctagacctgagaaagtgatagagaaattgttaagaatgcggactacagttaaacttgtgttggtatacaacaattacattgtgaatggcacaaaaaaatcgaggaaatggtctttcggtacttgtgaactgtcatccaattcaataaagaagttgctctcaatattgatgagtaagagaagttccgatatacacagtcattgtttcactttcttcttacttattaatgcaaaagaaaatattattwgtgtcagaacctaccaggtttggtaagtattaatgaaagcattttgtaagaaacagttggctatatggaattttcagtaaaggatattatatgttttattattatttgtcaattgtgtgctgtatctcctttattttagtacartttataatgaacatatatatgtgtgtatatacacttttattttgatgagagccagttgttaacatttatcagcacacagtggctatatatatgggatgtgaagaagcaggtcacacgtacttttttgaaaagtatggcagagaagggatgttgcataggtactaggttggtaggtagtcagaagatgtttacaggtttgggagagcgtttgtttgtttgtgtttttccttgagtggaaagtgagcagccagtagagagggagagattgatggtacaggcgaaggtggaagtaaatgttagaagaaggcgataaagaaataggaagaaataagatatagactattgtgggaaaattaaccttgaacacaggaaggacccctattcctgtaaggatgaggaaatgataaacataagwtgtgataaattaagtacacgtacattaaaatcacgtacatcagtgaattgtaatttaagaaataagaaggatgaggtcaggaaaagaagctcagaaagatatcagttaatttatgaataaagtatagattaagaggtgaatactatgattgaccatggcaagatttcatgctgatttaatctctgaactattatgctgtatttttagtctgtttttctaggctgaaatatttaaataaaaaatgagagacaatttgaaggcgcctcattgcatttaaatgccaactattatttcttttacttagctttgcaatgtaatgctacatttccatggacacggattaagtttctacgagatgatcagaaatgggatataatttgaggttgactaaactacattcattgcatgcatggatagtttgaacacaaggtaaaatgttatccagactgctgaagaaaacaagtcttattttggaacatgactttcttcagcattataatttatgactttttcacttggattcttgcttttaacacactcttatttgtatatgtatgcttcaattaaagaaatgcataacattttgcttacactgtcttagttctattagttttcctgtattaaaatttgcagtccttatatttctctcagttgaaacatagtaagatacagagcttttttttatatttgcatggtagtttgacatttcaaatcttttcagatctattttctgaaatattaattatcctaaatattcatagagattggtattgatgatgctaaatatggctgttgatattgaatatacatatgtaatctgcccttagtgtgccattgtagctatcactttgagcctaacactgtagttacattccccctcaccttgcagtctaacagcacctcagacatctggctgaggacctcaagactttggaaaaataactctgcatgtatgttttcagagttataacactgttgtagcccactcagacagctggtccttgtgtttgttgattaatttatggttgcaagatgatactgtggtctaaatatcatgttcaaggtagaaaaagagggaagaatcagcacagcactagccatgtgtgtgtctggtttaatcaaggaagcaaacgcattagagagacatccttagcggaattcttcttagacctcattggccacycttggctacaatagagtttgggaatgtgaatatttagctttcccacatctatattgggagacagcaaaggagaaattggtagagaatgactgttgttagccaattagtagtgtttgccaaaggggatgatctcaagtcctgtctagctccaacctttgcatttttactatcagttgaatgctatttcacctggaaggctacctttttagtccttacctgcaggcctgggacaaactttgttgacctccatctagactatttttaattaataagtgaagacctgacacaattccttctggcggagaggatccattcttcaatgtcaatctagatggagcagtccaggaagtaaccccagacttgaaagggaaccaatattaatgacatctcattctcaagcatggctgctgggaaggcttctgtaaaaaagataagcaaagaggaaagtgatctgagaatctgcctgataatactttttatatctgaacgatttaaacaaatatagctgcatacattgctgggtggttttccgttttgtgtgggactatatattcagacttcttgtttgaaatatgttagcctcttcgcagctaaaaaatattagaaacgagtgaaatttaaggcaaccatttgttcatacactcccagggagcatagagtatagattagaagtgtataagtatatttctaaaaaattcatatgtccgggcacagtggctcatgcctgtaatcccagcactttgagaggccaaggtgggaggatcacaaggtcaggagatcgagaccatcgtggctaacacggtgaaaccccatctctactaaaaatgcaaaaaaaattagctgggcttggtggcgggcgcctgtagtcccagctayttgggaggctgaggcaggagaatggcatgaacccgggaggcagagcttgcagtgagcagagattgtgccactgcactccagcctaggtgacagagcgagactctgtctcaaaaaaaaaaaaaaatccatatatggatcaatcttgcagtattcacatttgcaaaaatataatacttctgatcttctaggcaagtgataattcttttagatttgtgagaatatttttagatgacaaaaaaattggttgcacaagtgcatgaaaagccaatgattatgttatttgcaaaattacattccaccatgaaaatacaatgagatataagtttttctgaaaatgtagtagattccagtattgggttaagtcatttacattttatattattttatatccttgagggagttactattattttctccttttgaggaatttgatgttcaaatcggttatttgaccagtgtttcagtgccagtaactcatagcagctatactgtgaaaccaggcagtttgccatacctgccagctgtggacctgtgctcctagtaataataacaattaggcattatgccaaagattttatagtcacttaatctattattcattaaaatcctagaagctgatactactatcatcatccctgttttaaagctgagaataaatagtattagagagattcagtagctgtstcaattttttgcagcttccagggctaacctgtggcttcaaactcaggtatctgacaccatgtggaccctaaccacttcactacattgatacttagttacacgttgaattgtatctctatagttttctataaaatgtagtgtttatttctatagagaaaaattcatccacgttttgaaattcaagaaaagccttctcatgtttctcaatggtttcatgctgagataattttcctgtgttagatcaaatttgctagcaattttcstggtgtatgttaatgaaaatttgatatgcattgctttgtttcttgcatatataaccataatttagattagttcattttttaggtaattgaatttttgagaataagaaataaatttatattagaaaaattccagaatgagaaattggacacaaattctagcaattgtgaaaattatgcctgcttggaaaagttacattttatgttacttgctaaaattttttgaaaaggataaagtgatcaatttatctgtcaactatcactttgattaaatgatattaatcaaaagtactgtgtattcmcttatactgtgaattatgattgggaaaaatgtgattgatattcagtgtttaaaaataacctacctctttatagaaacagctatatgaaattatagttcattctagatcaatagtgctttggttttggttaacatatgtatcacataaaatatatatgttttggttaacatacgtatcaaataacatatgtatcaaataaaataataaaaatttatttttttattaacraataatagagttgatttaataaatcaactctattattctaggcagatttcatagcctaactccccttcaccaaattcagtgctgtatttcatagtgattgactcagaggagaaagatctgtgacttctatcttgctgcatgaccttggggaaaattggcttaaatgtatgaaaggatatttcaggcattgactcagactaaataaatgtgctaaatttgatacagtgagtgggaaatttttctcaccacatggaaccactaatgagcttrggaagtaaacatagttaagtaggcatagttgcctttttgttacaatcattctgaattggtccattagcctgaataacatttcaatgaacttcacatttgtagctttaggattgaccaaaccaaaccgcaacattataaactatttccaggtgagagggttgtagtgggttgaattgtttttccccaagaggtctgtttaaatctgaacccctggtaccagtgaatgcgaccttatttggaaaaaaggtctttgccgatgtaatgaagttaagatgagatcatactggagtagggtggcctatcaatccaatatgactggtatccttataaaaaagaagagaaggtcaggagatcgagaccttcctggctaacacggtgaaaccccatctctacaaaaaatacaaaaaattagccaggcgtggtggtgggcgcctgtagtcccagctactcgggaggctgaggcaggagaatcgcgtgaacctgggaggcggagcttgcagtgagccgagatcgcgccactgcactccagcctgggcaacagagcgagactctgtctcaaaaaataaaataaaaaattaaaaaaaaaaaaaagagaagagatagagagactgagatccccgcagggaaaacaccatgtgacatcagaggtggagactgggatgatgcagcattgaattgatgcattgggatgatgcacccactgaagaatgctaaggattgcctgccaccagcagaagctaggaagaggcaaggaaggactccatccagagtctgagagggagcgtggacctgctgacaccttgatttcagacttctggccttgagaactgtgagaaaataaacatctgtggttttaagctgcccagtctgtggtactttgttacggcagccctaggaaaggaattcagaagttgagaatggagagacaatggagagaatgaagagtcagcagcagtggtagtgctccctggattgactctttctcctgtagttccacatctttcctcctctcttatgttattatcatacacattagacaactgggctctgtttcctcccccttcatcacttacagatctctctgagtctcatttgccttgtcagtgtgatgaggatcttaaactcctctgagtaataataacaaccaacatttatgggagtttaaccccatagtaaagccagggctcagggttaacatgcattctttcatttactcctcaccagaatccatgaggattatattgttattatccctacttcacaaatgagccaagtaatcacatttctctatgacatcttgctttctcttgccttgttccttcagagacttgaacatgagagtcagaactggaatattgtcagtccttatggttccttgatgggaaatatagcagatccctaactttacttaatctgggtagaatgggggtgaaggccattggaaaggaatgttacatcaacatgttgtgtttgtcttggccatgtcacagtttcttcatgtatagaacatagaaattttttataaaaattctttcttcattatatttcccctattttattggggaaaataattttaatataactcccttattttctagcttgcttgacaatttcactgtctgagctacttaggatataacagaggaatttaatgatatagttgctattattgacattcaccatgtgctaggaacagcattatgtacagcagactatcagatgggtgatattattactccacaccctacagtccagggcttaagaaagtaacatggtccaaattactagccttcaaatccttgtctattttgtatccagagcctatttttgtatattctttttagggaaagccattactacagtgacatggattaatttatcagattaatgctgaacttggaagctggacatckgggctttaagagaatattggccaagaaagggtagtatgggaaatcggaaaacacctgaaaagtggcatgctgaatgcaggtagcttagatttaagacggcatgagtaccccatttttgtcagcatggggatatcagagttgaacctggcttctttcagaatattttatctgaagctcttctagagttagactaatttccttaattaccataattagggccaagcaaaaattggatgtttcctgtttcactttttggttgcttattttctctgagtcaagaacatgataacaaactttacactctatttctaacatggaccttttagtaaatggtaggttactataacagaaaagatgctatatctgaaatcaaagtgcaccagtccattgcatgctccatgctatttccttgcaagtctagatactgtcacatgcctgtaatactaaatagtcttagaaaatacagcaagcagcagtgttggaataggtcttagaggcaaaactgatctgaccaagcaatgtatgttggttaagtgaaatatgaaaggcagtctgttctatctcagctgaggacatttgccatagaaaatgtttgttatggcacagtagagagaccgaagctaccagtttcttaccaccaaacttgtcttggttgaatttgtctcctgtcttctaaactctagagaactgtcggtcttctgaagaactgttcagcgtagtgaaggaaacaggaagagagattgaggagcttagccagttgatcagagggatttaatgggaaaacacacttggatagtgaatagacactggaaaatctgactgtctaatttggattttcccaatatacctgtcatggtaaagtgaaatatctgttggactgaaagtaagtgtgtcagttattttggtcacagctctgctacaaattgacattatgactgggaagtggtggtttgtgcccataactttctccgtgagtcaaagctgtgggattttacatcctttcaacttctctcaaaattcttttctacttaaaagaccataggtgtcatattgagaattcatttcatcaagtattgatcaatccttggggtgtttgccatgatcttgtcatgctttccatctttgccaccaaagaatgtttttgggggtaatgtatgggaagtttgaaatgtgaattatatcacagtttgtatctggaaatcagtgtctaatagataatgatgatagtgactactgtctagtaaacatttactactgggtagaaaagtcaccagattctccacaggagaagattttgctcccttgggacrtttggcaatgtctggagacatcacaacagaagggaggagtgctactggcatctagtgggcagaggccaggggtgctgctcaatatcttacattgcacaggacagccccccacaacaaagaattatgtggtccacaaggccagtagtagtaaggttgagaaatcctgctttacagcttgtttaataaatatgcatgctgatcatagaggatgttatgctcatcttgtagctgaggttcaaaagggttaagtaaattcttcaatgtcaagccattcattagagacggagccagcattccattccagtctgtaaagccaattgagggatggtccccaaacacaaaccttttctattttgctgctttgggaagttttcttcatcctcgtttcttcatttttaagataagaagatctgtcctttaccagaagtttgtagtagtatatttgggtgggggtaggcagcggggagaaaagacagggggtttggagattttcaaaaagttgaggtattatgcttaaatgtaatatttttggcaaaaatctgtagtcataagcagtgtgggtgaaatacaaagtgtatatttagactttagtgttgctcatacatatgcattgtttttagattaagaatgagagcttttagtttttgcttctctttgtatctttcaaaagcaatttgatttgctcttctcttgggcatgatggtgatttgtagagcttgctggttgttgagaaatcgaagactctttgtgggttcttaaggatgagagtttacttccacactggcagtaaggtagatgttgggttttggacttagagcataacagaagacatagagatgagagaatggccaaattgcattttagagaaagaagtgcggagaaccccatgagaaaactgtgttttacttacatctctggtcactgataaatctcaattttgggacaaatcctgacagataaggaaggttattggaatgtaagaggtaagaaaaagttaatttaaattattttatttgaaaacttacattttatgagtgggaagtgtggtttaaggtaattggcaagactccctcctctagaatattaaatttttgtcaaaactgccttttgaatagagtattttgggacttgcacattgaaaaatataggcagttgccttgtgtagggctatacttgcccgtagagttttacacttccacagggtgtcgggttttgttctggagacttgtggcagcagctttagctgctttgtgtgataatcagcacacagagcaaaggcacctcagtaatttactgggtgttcattctgtcaattggtaggtttaataaagagagaaaggacaggacatgtagctaatacagccaaggtaaggtgagcaccataagaatatgcaaaaaaaaaaaaaaaccattgaaattatctataaaggagttgaaaaaacagcttttaatcaacattcaataattgaaccttttaagggagcagtacacagagatgtgctcagtgtggcagtcaagttaaccgaaagaatgaattccagcttttcaacgtgaatttcaaagcatcaggaacactgaggcctaaaccttactgtcttatactaacaagagtcttactgttttatartaactacattctttttacaggcattactaatgattgcaatttatttttagataaaaaaggttattattgagagtaggattagacactctgaaactcttaacagtttacaaagaagagatgaagagatcttgaggaaaagatgaacttttctatgtcatatccaaccttgatttgaatcggaattattattttgtgtttctttttcaaccttttatgaartgaaggcattcttgtatttcttcaacatgccagttccccagaaaccaacttcaagatccatggtatcagcagaatttaagtacaagtaacagtaattatagtattgaaaagcccccatagcattcaatcataatattttatttaaggttgggagagcttaagttaattcattttcacaagcagttgaaagattgtggtggaattgactttctttagagaccatatgcatatttaccagttgaataaactctggttgtcagttatgtgtgtaggttggtgagaatatggatatgttatatgagggcagtattcttgtagcgggagaagaagatgtaaagtaatggaactgacagtgagtgcctactgggtttcagacacagcgctgggaaatgctttggtatgtagttgtcacaatgtctctgggacctagatgatattattttcattttatagctgaagaaaaaagccaaaataactaggaagtatttttcctactatatccttatctgagtcaagaaatggatattttttttgatgtatatgtttagtgggggcaacttttagttgttggttgactcgaacacagaattctaaggatttgggtctatcattatttttaatttttgtggtgttgtttttgagacagagtcttgctgtgtcccccaggctggaatgcaacagcatgatctcagctcactgcaacctccacctcccaagttcaagcgattctcctgcctcagcctcctgagtagctgggattacaggtgtgtgccaccataccgagctaatttttatatctttagttgagatggggtttcaccatgttggccagtctggccttgaactcctggcctcaagtgatcttcctgcctcagcctcccaaagtgctcaggcatgagccacagtgcccagcctggatctatcattamatacaaagatttctgctagggtttttttctttatttgagggcaaataattcatatacttattcaaattactgctttaaatatttcccaatggccctaaagagacattggttgcagtgacaggttttggcacaatgggtggttatttcctaataaatagcccaatacctatttaatttgtaaagtaattccttcctccaacagaaaattactttaaaatggaagctggtaggctatcttagttctaattttgcattgcaagttggtactgcaagaggtcacaacccccttttattcagagctattttatctaaaatggtaaaggaacatttatcagtttaaaagccagaactccaaatgtgatttttgcagctgataactcagtttcatgcctaagtattttaattataaacaaatatgtaaccccccgatttaaaacaggtggcattcaaaagttcatttggaacagagtcgtatgaaatttgaaacatttttccatagaaacaatgttaggtttccaggccaacccacaaaagcctatttaaaccatatcgtacaatttctgctctaaaatcatcacggggcccacacaacatatataataatatttctattgggaaaatgcatttggagtttagcttggaatagactagaatttcactggagtagaactgggcattttaaagtcctcctgccattttggcaatgaggatcagcattttttccctaagatgtatctttggttcccatgacctggggtgaagcagtatgaaggctagggcaggcaacagggtgtcttccaagggtgaattcatgattcaacatgcttttggctacaagcaagagactattgaacttgaatactagagttaattctctcacataataagtctaaaacaggcagtttaagcagtggttaatttaacatctcatttaagtcagggttctataaacctttataaccttatagttggaagatgtccaccaaatatgtaagaatcttgtctgtacataacaacctcctaaaggagaaagaatgaggggtgctatcttaatcttactaaataggaaactatttcccagaagccccacctccagcaggtttccctttgcataccattggccagaaccctgactcacarcctgccccaaactaaacactggccaccaagaatcagattgttagaagtggcttagagtctaagttctagttgaagtatagttcaccttcgggggataagcaggtggccaccttctgtcatcactttgccgagctcatttggagatctgtagacaaataagaaggtggaatatctgttgggtgaatgttatctatgtcttttacggtctgcttccatacagcaatagcctagggcaagggcaaggtcagaaaaattttagctttccaagtggctgtgtgatcttgaaaaagtcatgtgcttttcttctgcagactccagtttctataaaacaaggaggtgggatagatttgtttattcctcagtttattcattcaacaaatgttaatgaagcacttactttattacaagcagtattttatgcatggaggttacaatagtgaaccttccaaagttcttcccagatatcttatgtttttacatgattccatgtgagaagctgtggtcctggtaaagctatgggcgttggtgtagggatggtgtgcacccgtgaggccttctaataccgtcaactctagggggagtttttggacgtcatgggttcatttcactttatttatttatgtatttgtttatttatttaagaatccaagagattgatctggttccttccatttgccttgcccccagctgctgttactgacagggtttctgctttccatattgcccattctagagcaacacacaacctcactgcatttttcttacacttctgcctctgatcccaaaaggaacagatgactgatattttctcagtttttctttctttctttttctttttttttttttaacattgttagcaacagaggaaatagatgacagtggttgttgggggaagcttctctgcccttcacactttttcatcctagcactgtagagaaagataaaagaacattaaagcagaaagagtgtgttcttgagtctgtaatactgaggtattatcttcttatatttttgataaatagccagatttgatgatgaggagggagaarggtgtgttggaggaagttgactsgtggctgagaacagctgcagcagtcctggggaatgagggtacccccccatcttttaccctttgtctcagccatatcaattcctgccacccgggacactgcctaggacaggctgcagtgcaagtgaagatcaaggactggagaggggaaggggctgtgaaggcaacatcaaaggttttggggctgtgaggggagatggcacagagatcctctgttgagaygctgagtttctaggactttcctgaatctcttttttccaagggaatgtatatatacactaacacatatatatatgcktgtgtgtgtgtgtgtgtgtgtgttaaatggagcaacaagatgaggactggctcatgatatatatgatttgtttcttaagtgatgataaaataaattctgaagtactgtggtgattttaatgacaacactttggaaaccttttgggacatgtagacagggattacagtctgtgttatctacttatctatctcaggggtcggcataccattcatatttactatcagcaagatagtaaatattttaggctttgtgggccatatggtctgtgttacaactactctgcccttgtagcagaaaagcagccatgcacaatagctaagcaagttggccgtgttccattaacactttagctatggacaacttccttgtgtttccttcagtttcatataattttcatgtgtcataaaatatttttctgttgagtttttaaaaaactatttaaaaatgtgaaaacactcttactttgtaagtggtgccgaaacaggcctacaggctgtagtttgtcaaccctgagtctatctggctatcatttgtttatttgttggtctatctacctgtatgttttccttcttccttctttcatctaggagaagaaatctggttccattaaattttgtatgagaaattctttcctatttatatagtcaactactctaaacacttacaaaggggatagagaataactgatttattggatttctggtattgattcgcttgtgtcctgtggttgaacttgtacaagctttatgtattattattattttaaaatactacatttagcattcttatagccaatttagaataattactttgtaaaagatccttgaggaagtacattacatctaataaaaaattatcttggatcttgttaagacttgaaaaccccaggtgaatgatagcgttgggtcagtttttacattctgaatagagcacgtgttttttctgagtcagacaggcaagacttggatagctgtatattactgtttatgagccttatcctttcctgcaaatcaagtgtttattccactcctgaacttaattagcagctaagagctttgtgctttgtattttaaggaagcatgtgatttgttcattagttcaaaagcagattaattattatatctttagtcaccatctgtaaacacatctatattggtgagctctctcctgctgagttaccttgaaatgccctgtggtgttttattagcttcaattctgtgtttattacagttggctggagatttttcaatttagtttattggccacagaaagtccaatcattctgtggaaactaccaatttctgagagtgaggggtttactagtgctggctgtcaatttgctctaaacattttccccaaatcaaactgtatttctgtttggattaaagatagtagtagtttgattataagctaagattttaagcaccctatatattgtccrcattcaaggaagagcaattgggattaaaattagtaatctgcatgaaaaagtatctttctaatccaagttagctccagacaaaactgtgaagtacgtgaacgaaagaggataaatgaatagttattgatgcctgggcattttaatattatctaattttggttttgcagcaatgctgttaggttccaagtgattctcagagaatttaaagaacttgcataagatcattgatagagctgggatatgaatcaatattagtgtgacttgtgagtttgtgcttctcttcaccagtgtctagattgtcagaaaaaaatataggacacctagtaatatttgaattttatattatcaacaaatacttttttagcataagtatgtcccaaatattgttgtcctaaatattgtgtgggccatacatatattaccaaattatttgttgcttatctgaaatttatatttaagtgggtgtcatgttttattattacttgtgaaatttggaaaccttagtagtgtcccttccttctctctccttctctaggcattaagtctgtccaggaacccctttatctgcttccctgctccctctgtacttctggctttggcttattaaccccattctttgcttctttagtttgcagtttacctgctcaggtaaacttaaacattaactggggaccttattctctctggttttcaaagtgtctagtgactattttaaaaaaggaataggattagcctgtttgtcagagctaatgtcttcagtgattatatttttcaagttatgtatttacttaacacagccatgctttaatgcagggtaactctagaggccaaaatttttagaccctgtgcaaagaaaaagaagagcttaagaccattcttttagttattctgatagggtatttttcccacagaacctgttggtgactttatgtttttaattttatctaaaatttgattattattattattcagatttcttttgcttttgattcttgtatactaaacaaattttgaagacaattttcgtgcatttaaaaaaaactttataaaatacttttcaaagaattagtagatgattgaggtctctaacaattcttaaactatattttcacttagtaaaaggtaacacttttacaatacaatttttatttcttgagtaacaagaatacagagggaaaagttacggttctcagtatccaaccatttagctatataccaacatagtagcagaccagaygcttctcagtgaagctaatccaagccagcaccttatgttctctgcccaaactctaggaaacttgtacctttaccaaaaaatctcagagactggcttggaaaccactgggtaaatcagtaggattgttttattatctagttaccttaaggactttaactggggcctcaaagtcttttcagaccactaagcaggaagcgtgtgctgttagccataatgtggctgcaataagaatgatagttttgggtcagctaacagtatgttatggatgaatgtggctcctttcatctctctgaatcttggctttgttgtctgtaaaatcaagcaggggtgggattgaatgatagccgaggtctttattagtttgttactggcttcaacagagttgggaagcctcaagccacatgaacctttctcagaactgcttctcaggacaccttagggtagctgagtgattacaaaaagcatctgaactatgtgcagatgccttggaatagaagcaggggatctggaaaggctgttccccaaggtctctgcagtcagccatgcacttagatttgactacagacaaaacagatgtattcamaaaattgaatggcatgttttacctaaatggtaggggttagggaagatagcttcttaatgggtctttgtgccatgtctctttattccttatgattagtacagctgaatcctgattctctttccttttccttgtcttccttccctctcttcctgtctctctttttttctccctccctctctcattgctcatttttttccttttcttcctttcttgccactctaacaggctgagaacaggacttttaggagctagctttccagaagtgatatagttacattgccttatctggatttccagagcgcatttctcctcatgtgctttttcgcaagagagagaacataacataagcccctaatcctttcaaatatgttaaagagaacaatgctgtgattgaagcaaggagactgggatttgactctcgtgtcttcctcttacctactatttgtatggctattgaagaagtcactgaatagatttcattatatctaaaatgtgagtataatcctcattgaactcttaggatttcattaacactgaaattctattgaaaaacagtttttaaactgatataccatggaaattattttttcatgtgcctaggtaggtttgttttctttcttctctctgtaattccagagttgttataatgtgtctttctctcatgctagactctaaattcattgagagaggaccttgttttattcaccttttaagttttaattaataagcctatagaacstataaaatgagtcagcatttagtagggtcttatgtgtactaatgtgtctgaaggcatgtacacataaatttaactaatttttattttacttatgattctgtccagtttttaatacaatattaaaacctgaggaaagcagaatatttaactttgttattatagttgattaaatactttactgtctttttgcatattcaattatctgtagcwtgtgcagtcttgtaagacactggttgtggtactcactcattcattcttaatccattcatctatccaaccaatagttattttccccattaactgtcctctgaattgtgctaggcacaaaacagatgtaaactctgacatcatgaagcttatagtcaatggaggagaaggcaataaaataagtaaacacaaatgaatatgtaatggcaaagtgatataagtgttagggagagcatccggtttcaagtgaatgagaataacagtgtcacccactctagaatggatatatttaaattctttgaggaagtggcactgaagctaagagagatctactcttgacgatgattagttcttggctagacaaaaccaaaccaaaccaaaacaacacaacggatgaagagtggatcagacatgttacatggtacatacagatggagtatcccttatccaaaattcttggaaccaaaatcctttgaatattttcagaatatataccagttgagcagccctaatttgaaatccagaatccacaacccagaatgctccaacgagcatctcctttgagcatcatgtcggtgctcaaaacgtttcagattttggagcattttggatttcagattttcagatcaatgctcaacctatataatgctcaacctgtataaaggccctgaggtaggaaagagccatgaggactcaaagaattgaaaggtaagcatgaggaatagtggcatgagggacggtgatgctgttcatagtgcccaattccccaaatgttttattcccttactaaattactccgttgtagttgctttttttggtgtttcatttttcaacatcctcatatgcctcctttcttggtaacagctttattgagatataatttacatatcatacagttcaaccatttaaagcatacaattyagtggtcgttagtatattcacagagttgtgcacccatcactacaatcaattttagaacaacttcatcgctattctctttagctgtcacccctaaatccctccattcccgatgccctaggaaaccactaatgtactttttccccatttatctattttggatatttcatatacatggaattatataatttgtgatcttttgtgtcatgcctcttttaacaattttctattgcatgttcatctgcttttcatctttgctcccaagttaccgcagttatggacttttttttgccttcagtgtgctaccttgttccagtgaagttatttctctttttgtttccctacaccattagcaatgtccaaacttcgaagagtttccatattgctaaatgaagtcataaaatttatattaatgaaaagttgtctttctagtttcttatwatcsagtgtttagaaatctttacaaatcaccagttggttatttttctgttgctcaaatttgtgctctttcacctaaaagaattaggaatccaaatgagattttgtactataatagacaaattgcacaaagcttccatccacctctaaataaaaggagaacttcgtcagcatacattttgacattttagatggtatgtgtaaagaacacatacgtacccaaatctcttccagtgatttctcaaaaggtgagctctctgctttaaaaatagaacattgatgattcagtgcccaatatttrttagtatgaacttaaaaaatattgattgattgataactaatagcaaaatttggttgttgggtagatatctgcagtctgctgaaaatcaaaatgttatggttaaagaackagtttagtagcactaatcagaattccttggtttcttgggaaattagggggttgctgctttactaccaaagaaaaggaattaagaagtattaataatcttcatttgtttttggctagacaacttgtgggatgcagtagggggtagagtgtatacatactattaaactatcttctgaaataaattgtagagggcattttttgaaggcagaaaaggaagagtcagtgtgtttcctaagccaaagctttggtcattgtcactactccctttctgttaagcaaaggacagaaactctgatgttacgaacaagagaggagggtgaaggtgaggcggtgagagcctcagtgctagcaaagggttttagacgcacactccctcatggagagcagatctagtcaggcagtcatgttcacacatctttggtctttgcactctgagcaatacaaaatttaagaattatggttggaattatagataattgggagtcaaaatttaagacaccttcttccccaatatgttttaggcaaagaagaggctggcgtcaagtatttaagagctattttagctaatggcaacagatagattatggagaatcactgcttgttctgtgggccaggtggtaattacagacttagagatataagagttgaatgtgttccattctctaacaccttcacacgcctctttttgaaattctctattgcgtgttcatttacttccctccctttgctcccaagtcacagcaattaagggctttttcttcccttcattgtgccagtgtgtcccagtgatgttatttctcttttcttcagacaatgagtagcttccaaaatccatgatgatctccaaattactaactacagaagtcaaatggaactacattcaaggtgtttagaaactctcataagattgtaataatatgaagaataataggtaaaatattttgtcatatctgaatatattcaaaagttgtgattgaagtctttttttctttttgtttttgtttgtttgtttttaagagacagggcctttgtctcactctggtgcccaggttaaagtgcagcgggtgatcacagcttattgcagcctccaacttctgggctcaaatgatcttcctgcctcagcctcctgagtagctgaaaccgcaggcacrtactaccacacctggctttgattgaagtttttagcctcctttttgtgggatccaaaaacattcctttctgcattatgtggaagaaattaataattttcaaaaaagacagcatgttccttcaactaagtttattcagaaaatggcctgtattcattaaaagaccttggctgagttctttggacctgtgaggccttrgttttattgtcagtaaaataaagagttgggcctagattggtttttagtaaggtgattggtgcaagaccttttcaaatgatattgtttctttatatcagaatcccaatgtgccctgctcccccttccctaaataaagtgacttattttttatttgattttacttttgtatagcaccctaaggttaacagtctttcaaaataactctcagaattaaatcaactggctgtgaactttgggccctgtcctaactgagtcctctggtctttaatgtagctgaaactgctcaccatggaaacagctgatagcagtggtctgtttgtcaaggaaagcaaatcttgattcagacttcttcccaccctcagctcaccatccttagcttctgtcacaaattgcattggaaaatacattggaaaaacacaaaaacacagaaatatgaactctggctcaaaatagaacaaattccacaaaaattgcccatggcatatcagtaaaatacaggattaatcacaaaaaataattatagtctttggacatatcagaatctcataatatatttagaactgttcattcctcttatcaccctcttaagaaaaaaaaatccactgagcatttagttaagcagtggtgatattctagatgacatgtgagaagacttgtcaaatatccatgacttgaaactaaaaacagcatgacttcttgtcattttagggagacttaggagctaagtctggtagctttggcatcagcttatttttagcagtgtgtgatgtctgtttttcctggttattatccctgggctcaattttgcarttataggatgcacatgttattcagcagatatgaacgttttcacttagcaaactgtgtacgtgaacacctttttaaatgacttaatgggctcgagttttgttggttgttttgcatttaaaatggcacttgagacagataaccaaaagcataaaatggaaaaagtgattattgtagaaaaatgggaaagcaacatgtttctgtaaatgctttcgtgtcgcttactcagagaaacaccatttgactattggaagttgctatgggaagcatgcaacatttccatggcgttacattttactttcttatttgcttgcttgcagttattctttaaaaatatctatatctatatatctgtgtgtgaatatacacgcgtgcacacacacacacacacacacacacatctctagcctttcatccatctattttttttttttttaatgtgtctgagcaccacttcttaggcaaggtcaacacagtaaaactcagctttgattataatgttcaccctcctggaattggtccattacaaccattgtgtgaataaccttgtagaagtttcctgtaaatgtgttggctccttggcaccatagtgttctcagcgttcatactgtgggactgctttaaagttcaactccccttagcaagagccttggtatttcagagactaaattatcttgtggctgagtaatgccaagtatatacctgctttattcctaattctgctggatagcatattattttttattaatgtcatggcatatattagttattattcaaggactgctagggaaagaaatgagccattggatgaccatataaattcctctataactctgatagatcaagaccaatggagctagtgcttaatttccaccattaactgtactgtcattatcaaaattcatggattgaatatacatagtttagaaattctcacgcatgactctgtttgaagcagtagtaacttcatatgaatttttaaaggcagaaattagttacaaggactgcataaaaggaaaaaagcagatcagttgtaagttatcaacatagtgaacaacattattactcattcttaagcactaggtgtgattctaaatcagctttctgtttctagttctcaccctcatctccatgcccgttcttaccctcacccaaataatatttgactgataccagaaatattcttctctctttatttgctacattagggatttcagagggaattcttttcatccaggaaaaagaaaatcaggccagttttgaggaactaaaaataaagctatgcaaaattgttttcaaagtggaattcattgccatttgtttttatgcatgacaatcctttagaatatagcattgaatcaaactatgattctgacttcaatgatttttatagtcagtttacgaatattcactatagattttcttatatatggtttgtatctaaacagatctaatttaaatcctggaagcatgatagtaatagtagtaatggtagtgatataatgagttcatcatatgtgacagactgtgataaattattttacatctattttctccttaagttctcactacctttttcaagtggatactgttcaccccatttaaaatgtaatgaagtaggaaatgtcttactattttgacaaaaatacaaaatcctcttaggaagataattgtgtttgtttgcaaaaatttctttctttyttttttttttttaaaaaggtagtatttaccatattcttttttttttcttttttttattatactttaagttttaggatacatgtgcacattgtgcaggttagttacatatgtatacatgtgccatgctggtgcgctgcacccactaactcgtcatctagcattaggtatatctcccaatgctatccctcccccctccccccaccccacaactgtccccagagtgtgatattccccttcctgtgtccatgtgatctcattgttcaattcccacctatgagtgagaatatgcggtgtttggttttttgttcttgcgatagtttactgagaatgatgatttccaatttcatccatgtccctacaaaggacatgaactcatcattttttatggctgcatagtattccatggtgtatatgtgccacagtttcttaatccagtctatcattgttggacatttgggttggttccaagtctttgctattgtgaataatgccacaataaacatacgtgtgcatgtgtctttatagcagcatgacttatagtcctttgggtatatacccagtaatgggatggctgggtcaaatggtatttccagttctagatccctgaggaatcaccacactgacttcgacaatggttgaactagtttacagtcccaccaacagtgtaaaagtgttcctatttctccacatcctctccagcacctgttgtttcctgactttttaatgattgccattctaactggtgtgagatggtatctcattgtggttttgatttgcatttctctgatggccagtgatgatgagcattttttcatgtgttttttggctgtataaatgtcttcttttgagaagtgtctgttcatgtccttcacccactttttgatggggttgtttgtttttttcttgtaaatttgtttgagttcattgtagattctggatattagccctttgtcagatgagtaggttgcgaaaattttctcccattttgtaggttgcctgttcactctgatggtagtttcttctgctgtgcagaagctcttgagtttaattagatcccatttgtcaattttgtcctttgttgccattgcttttggtgttttagacatgaagtccttgcccatgcctgtgtcctgaatggtaatgcctaggttttcttctagggtttttatggttttaggtctaacgtttaagtctttaatccatcttgaattgatttttgtataaggtggaaggaagggatccagtttcagctttctacatatggctagccaattttcccaacaccatttattaaatagggaatcctttccccattgcttgtttttctcaggtttgtcaaagatcagatagctgtagatatgcggtgttatttctgagggctctgttgtgttccattgatctatatctctgttttggtaccagtaccatgctgttttggttactgtagccttgtagtatagtttgaagtcaggtagcgtgatgcctccagctttgttcttttggcttaggattgacttggcgatgcgggctcttttttggttccatatgaactttaaagtagttttttccaattctgtgaagaaaggcattggtagctggatggggatggcattgaatctgtaaattaccttgggcagtatggccattttcacgatattgattcttcctatccatgagcatggaatgttcttccatttgtttgtatcctcttttatttccttgagcagtggtttgtagttctccttgaagaggtccttcacatcccttgtaagttggattcctaggtattttattctctttgaagcaattgtgaatgggagttcactcatgatttggctctctgtttgtctgttattggtgtataggaatgcttgtgatttttgtacattgattttgtatcctgagactttgctgaagttgcttatcagcttaaggagattttgggctgagacaatggggttttctagatatacaatcatgtcatctgcaaacagggacaatttgacttcctcttttcctaattgaataccctttatttccttctcctgcctaattgccctggccagaacttccaacagtatgttgaataggagtggtgagagagggcatccctgtcttatgccagttttcaaagggaatgcttccagtttttgcccattcagtatgttattggctgtgggtttgtcatagatagctcttattattttgaaatacatcccatcattacctaatttattgagagattttagcatgaagggttgttgaattttgtcaaaggccttttctgcatctattgagataatcatgtggtttttgtctttggctctgtttatatgctggattacatttattgatttgcgtatattgaaccagccttgcatcccagggatgaagcccacttgatcatggtggataagctttttgatgtgctgctggattcgttttgccagtattttattgagaatttttgcatcaatgttcatcaaggatattggtctaaaattctcttttttggttgtgtmtctgcccggctttggaatcagaatgatgctggcctcataaaatgagttaggaaggattccctctttttctattgatcggaatagtttcagaaggaatggtaccagttcctccttgtacctctggtagaattyggctgtgaatccatctggtcctggactctttttggttggtaagctattgattattgccacaatttcagmtcctgttattggtctattcagagattcaacttcttcctggtttagtcttgggagagtgtatgtgttgaggaagttatgcattagtactagattttctagtttatttgcatagaggtgtttgtagtattytstgatggtagtttgtatttctgtgggatcggtgatgatatcccctttatcattttttattgcatctatttgattcttctctctttttttctttattagtcttgctagtggtctatcaattttgttgatcctttcaaaaaaccagctcctggattcattctttgtaagggttctaaggagaccatgagccctgatctattaatacctgtgtgcctccctctccctctctccttgcaaggacatcttctgctggtgccaagacatcagaatgagatctagattgcaaatggtgtaagaagggtttagaactcctggttttaggagatggagggagtgtggaatagagatgagagggagagaaagaaatggagccaaatagcaagatggtgggaagctgtagtgagagagagagagaggtgtgtgtgtgtgtgtgtgtgtgtgtgtgtgtgtgtgtgtgtgcacatgctcatttagttatttgggttttggctcaagtggatacagtgctggagagagcccaagaagcagagtggggcaggctgcaacctttctaggaactcctttggacatgcaccagccaaaaaattaggggctcaagtctatttcattaagaatctaggttggcagggaaatgcccagggacatcgctcacatcacagtgtaagaaattgagaaaaaatgytctcctgaagtcattcaattaatcaggggcaaggatggaatgcaaagccaagtctctcaattcagagtactggattctctttattataccttcctggcactctagaataatgattctagcatgagacatggtaatctcaacaaataaatgctatgattatgtttatgcttactagcagttctagtaatcttccatttctaaacttggtagtcaggtaatcagatgtgttaaaattttcttttaaatgattcattctagacagtggaaagtatscttaagaatattaaatatttaattttattgggtatcaccatcatataattataatctggacttttttttttttttttttttttgagacaggctcttgctctgttgcccaggctgcagtgcagtggcacaatcttggctcactgcagccttgacctcctgggctcaagctatcctcctgcctcagcctttcaagtagctggtactgcaggcatgtgtcaccacgactggctaatttttgttattttttgtagagatggggttttgtcatgttgcccaggctggtctggaactcctgagctcaagcagtcctcctgtcttggcctcccaaagtgttgggactacaggtgtgagccactgtgcctggccctggacttcttatgacactttattttatcctgtggcaccaagtaattatgatgctttacttataatctatacacactacgtttgctattccttttttccstgtcagggaaaagtaaagtggcaagttttacaaactgttttgtaatatgttggactgtatgagacacctctagtaggctgaataatggcaccccataaaatatccaccttctaatccttggcatctgtgaatgttacctcatatggccaaaaaggattttgcaaatatggttaaggcagggagattactctgattattctgtattgtccaggtgggccctaaatgcagtcacatgtatcttataaagagggagacagaggggtatttaatacgtacagaagggaagaaggcaatgcgatcatgaaagcaaagactgggcagcctccggaagttagagtcttcaaggaatgaattatctcctagagcctctgggggagaacagccccgccaacaccttgattttggcccaggaaaactgatgtgggacttctgtcctccagaactgtgagagcatacattctgttgttctgtggcacaacggttgtggtcatttgttatggcagccacaagaaatgaatacaacactgtggagaagtgtaagcccataagcaacctcagtccatgatgaaagccatggctagatgtaggtgttttcccccaaagccagggtactcattactcaaataaaattcatatcttcccaaaatgaaatctgcaaacatcccgggacccttctacctgggaaaggaccttctgataggaaaacagtgacagcatattaatctactgcttggggaattcttggcaacagggatatggcctccatcccatgggagacagaactggcaaaagaagaaattgtggatattgttgtattttttaaagatggaaacatctgcataaaagttattgtacagggttttctctttgagcccacaaaaacaagaaaaaaaatactgtcttccaccgaactttaaaaaagtcactcttagactagatccagattttatcccatctcttattattttacttcaaataagcaaaattaggaaactgtcaatactttgtattatgtaggaaaaattgttatacattatgcttaggctattgattagtgaatattttctttttagctgtgcagttactatatccatctaattatgataacagatttttaaaataagttattggttggtatgcagtatttgaaagaatgaaattaaccttttcctttcattatcaaggattttaacttacatgcctatgtcactgaacatacacatatatagaatacatatatacactgaatatatatatatattctgttttttatttgaagttctttagtaataaaatatcaccttaaaaacaaagcaatttctttgacacagcatttaatttggaggtcactcatattttaaatggggagccaaactttaaagttttttttttttttttaaagagagtgtctacaatagaatttgacttcccatgccttcataaagctaaaattctcaatgagcagcatttttatttaggataaactggcctctatgaaaacaagcatcttcagcttttgagaagttgtgtgccctgattagcaagcaagccacactagactttaaaattgaactgagggccctgctgaagcacagcttctattgttctgtaatgagtgttttgcagagtcctttcaaaagtaaactgtattgttcccttgctagtttcagtacatctgaatgaggtgattatgttccttaaaaagcactttcaggactgcagaaaaattatctactttaaaaaacattttttccctttatctggtgataaattttaaaaccttgaacatttcatgagcatcctggcaagaggtttaaaattatctggaaatcctgcctttgatccaaggtgcagagagtctaaaaacccatcagagcctataggcaggtctctgctgcctgagctgctgcttgagcaggaaattttgcatagtaaatactttaaaactttggtattcagagagcaatattaaatctaggtgaggactaacatctctgaatagagcaaaatttcatgatgccagggtacttgtatagctattgacagcctagtttttcaaataaaattttaaactgctggggcacttggagtccatttgtatttttctgatgcaatgtccgtggggctttcagaatagcggggacacgggtgggattggagctcttttttttaacctcttttcatttccacatgtctgttattcttagtgacttgtatcatttccgtattaccaagttgaaacagccacaatcttggccctgctgtcaataaatttgttgaattatttattcatttcatttatttatttatttcaataaataatgtcttagagcaggaccaagactgtggctttatagatttgaaatattttagggaaagcagagtttacaataaaggaggcaaatattggattggatctagaataccctatcagttcattgaatcataatttccccacataaawccttgggttcttaatttatcgaattgaccctagtcctttattgtgtcaggacttttttcctaaatcctaattgagtgacaagttctatttgaagaattccagcacttcaccactctgtgtgtagatgagttatttttctgtctcctagagagtatagagcaaggctacaaagagcctgtaccccaagggtctcctgcattttccsatgcccctaagcatattttaggtgatatagaaaggattagacatgtcttaatttggcccaaataagtaacttaatttggcccaatgaaacaacccttgaaatacgttgtgtttccaaaacaatcagtaagaggagagtgatcccccagggagcccctcacttctcctgctcatccttctgtccccccagtggcaattttcattcttatccctgaggttcttctccctattaaaaaaatacacgtttgaagatgaaatatactggattcttgtgcagtgccatgacgtcttatggagacatctgttctgttgttactgggatgaagtgaacgtcaccacatggaactttgttgtgcctccctcaccatgcaagggaattagagttttgttaattccctagttgtttctctgctttaatcagagggacaactggtcagagagttttgtccttcctgggaccagctcattttaggccattctaatgactttgcagcttgcccttgggcccaggcctttgatttcaggtggcccatagggctgcagacttttacttcccttgaaatgaacagctccatcatccatcctcctagaggacgtggcgggtcaagactattcagcttcacgttcacaacttctgcctcctcctctccctgctcccaagtgtgtggcgtaaaccgatagcagccaccattatatgatgctgagggagcctccttccttataaccttccgttgtaacagctgcatccacagaaaccctggacttagttgtgagatatattcagtccctccagggcaggggatgtccttcagttccatccttggatccctagttttgaatcacttttgatttatagtaacctgggtgagatgcttccaaaactccatcccctgctgcttcatcacctaaatgtgacactagggcaaagatctcccccygcttttgtaaactggyctatcctgtgcacctacgcctattgtcaaattaataaatctctataatggcatatttgtattttgtagsaattgctgatagtaattcttttcagaacctggaagaacattcttcaaagaaatcaggaaattaagttatattacttgttaattcttaccacacaactgactacattaagacatttttaaaaaagctctatgcgtatgatgcttttggtcagtctgattatgaaaatggtatgttttagaagaagttctatttattgacagggtggaggcagaagctgtttttatattaccatgtcatgtttttaagtatgtaaataagatgaattgctgctatgatcaagtaaaaattaaaagcaatgtaataaattcatagagagtgagtgtttcttgggaggccgaggcaggcagatcacaaggtcagaagtttgagaacagcctgactaacatggtgaaacctcgtatctactaaaaatacaaaaattagctaggcgtggtggcgggcacctgtaatcccagctactcaggaggttgaggcaggagaattgcttgaactcaggaggcaggaggcggaggttgcagtgagccacgatcgcaccattacactctagcctgggtgacagagcgagactccatctcaaaaaaaaaaaaaagagtgtctctttttattttacctattaatttggtgcacagtatggctgtgcatgatgtattcttagtgtaggcattatacaaaaatcctgtgccatgtggcagataatctcattagaagaagaaaaaaagcctaaatcgacatggatcacctggtagtgtcacagtcttctctattgctggatctatttatgcaaaaaacataaaatcttcataccctcaygtctatctacatgtcacacctggttttgattttaatgactttcagactcttcagtgggaaggaaataaataataaaagcagtgttattgaaaaattctggaaataaaaacattttctgattatgaataatacatgtttattttagaaaatttggaaataaaaaaaaggataaacaagataaagtcaccttaaataccagctctaagagggatccattaacactttgaggtattttcttcccacagttcatggaaagtgaaggcttctgaactgcttgttgttcctcattctttgttcctgattactgtaactggaaccttcttctggtccaccaratcagaaaccttcggggttatcttggacttcccctttcactcaccctgtcatcttttggccctgtgggtcctacctctgtggatttccctgcccattccctctggttcaaccccactcctattattctaattcagtctccctttctctcttatttggaattctgctgcagctttctgcccagtcttcctgtacctagtcataccctcctctgctatatgcaccattctgagaccaccatatttttttttccctaaaagttaaccctatgatgttgtactcttgtttaagcctctgaaagcctctctgctctccttttcgtgatctgccctgataagtttcttctttccatctcttccttagcctcactctctgccttttctctttccatctcctctccagccatcatctcagtcactgtgctagcagtttctggatcatcctctttttttgcttgcacagtcacacattctgttccctgtaccttttcttctaaccaccttgaagtttcaaactccctgaggtctgaggaatgaagtagaaagaccttgtgatactgtatgtttattgtaaaaatgtattttgaatgacatctttctgttcctcctgtagaagtcagcttgtcatcaccgactctgggaacactccctagccacaaagacttaagtttcacttgctttgtgtttccacaatttatggacaacacttagactttaggtcagtaagtgatcctgaagatttattcaggtgacatccctgagaagcaatattttaggctgattttatttggacagtcaacaattgatatggactatatgtcatatgtcaagcactgatctctgattcctgtgaattagacagacataatctttgctttcatggagcttgtagtctggtatagtctgatgtaggcaagcactcaataagaagcaatgaataagcaagataatctcatggagataatttgaagtgataaatacagggtgatgtaatggcattgggtgcagttatatggtttcaagttgactgagctggtaagggctgtgctgtagtacctaccagtatattatccagacatatgtcaatcatattactaagttaacagcatttggtagtggaagctgtgcatatttgttgggctaatggttttagggttaaaaccttatttgaatgaatagaggatatttaagattggaaagaaacatgatagcattcaaataattgaatgactatatattagtactataacaaagagattctggaacactccagaagactgactggagcaaaccaaaaaatagaagttacagaggggtatattttaacttaatataaggaacatcttttaaatgtttatgattttctcatcaatagaatggatgtgctgaatctttgataggggttgtattcagataccggtgatctgtcagaggtgagtgaggaagttcctctaaaggagagcaaagtagcctagatagtttcagagatctctattgtgttactttgaggaagctcaacctaggagaaatagaggtatcccgagaggagcaaatttagggcagaacagaaagaccccacaaaagaggtcaatggaacaagagatgatatttctctggaaaaagggcacatagcaaatatataagactgttgattcaccagcaaaagagtcttcatgctgattggttgggaaaaaaaggaaacagaagaaaaagagatcaagaaaaggaaatgtcttattgaagaagagggaccctatcaagtaattccagaatgctgaatgctgtcatgctctgaataaatacggcatcaattaaagggataagagctttgattataacttaatgtctggctgagctatttcttacatcactgtttcttaggtaatagtttttagtctattatctaatagtccattagtacgttgaatagtattctataaatgaatctagaataatatgtttaccttccattttaggtatgatatggcaactcttcattttcaatactcacagtggttgattgagacataaatttatttgggctcaggcttggcttggtcaggaaaacaacaaaggaaaaagtttttcttcagagctgctatgtttatgcttttatgttgtggttggcattttggcagcataggtattaagttatgtaccacccaaaactacttaaaattagttttctcaggcttaaaagaaagagaccttggttttttaagacattgaataagctttagttcagcaacaacgggctgcagaaacaatgcttttracttttatttgtgtcatatatttaagttacacattattttcgattctttttgtatttattttttccttctagcgaaaacaatttggttccagtattttaagttattaatgcttcctagagaacaagtttaagttttccagtttaggaggaaaagcattcaaatcagaaaaccccctcatttttaacatttttcccaagaagcagaacagtcattttttaatmctctcataatgccctgggggcgttagacagacattgtcccttaaaaaagagaaaaataggaattgcatcatgtttgatagaagtataagtaacaagggaaaaatatgaaaccacaaaaagtggatttatttttttcctcaatatttgcatattttagcaaataggtttattgagcctcattggtggagggttgacaaggatatgtaatgttattttgtctatttaacaacttacagcttatttaaactctttttcctaaatgaatcatctccctttttttttgtctgaaaggtgacagtatatttattatggtccattttgtaaatacccgcttgcaaatagacctcttcatacctgggtgtgcctctttggagacatgcagaagaaaccctcccaatgtgaattacttcttgactttgcagacttaagatgaaattgcttaaaataaaaggaaaaataaaaatacactgcttgttttagtgtacatttggaaggttacaaaaattggattaaatattgatgtttgcttttaggtatttttgtcttttaattggcaagttaatagggatactttcttgggtgagatcattttctgtgaacttgggaagaatcagtttgcttgttcgctggtggacacatggaaaatacatcattggagcatatgttgtttatttttttattatgaaatattttagcaattcagaaaaatatgaataataaatttaataaatactcatctactcattatatgtttatgttttgtcttacctcaggactcatttttttttaagcaataaggcatttaaaatatagttgaagtgctctttgtaaaatttcactcactgtccagagttagccattatcctgagttgaatgtggtgtttaccattcccatttatctattcttttaaatataaaatatttattcataaatattacgatattatttcatatgttcttgaactttatatatgtggtatattatataaatcatttttgattttattatgtcattaatttactgtaagtattgaggtgtatccattttgacatatatagctctaggtccgttgtattaattgctgtgtattattctaatatataaactgctacagttttcacatattcattctcctgttgatggacatctagactgtttccagaatttctgttctacattgtcttgctgttaatatttttgtgatttttctcaagaagatgttggggaatttctctaggagtggaattgttgggtcacttactagtttcctattgctactgaaacaaattatcctaagtgtgctggcttgaaacaacagaaatgtattatcttcgagttctatagatgagaaatctgacatggttcacactgggctaaactcacggtatccgcagggctgtgtttcttctggaacctgtagggaagaatccatttgctttccttttttggcttctagagagtgctcacattccttggatcatggtctctctcctgcatcttcagcaggactgaagaaccagcactgctgcatcgactattattccataggcacatctccacttctgcctgactgtattctgcctctcccttctactttatttatttatttatttttgagatggagtcttgcttttgtcactcaggctggagtgcaatggtgtgatcttggctaactgcaacctccgcctcccgggctcatgcgattcccccacctcagcctcctgagtagctgggattacaggcgctcgccaccacgcccagctaattttttttgtatttttagtagagatgggatttcaccatgttrgccaggctggtctcgaactcctgacctcaggtgatcctccctcattggcctcccaaagtgctgggattacaggtgtgagccaccacatctggcctctcccttccactttttagaatccttgtgaatgcgttgggccattctgaataatccaggataatcttatgattttaggtcattttrttagcaacctaaattctacctgcaaccttaattccccttggcatatgaggtaatataatcaaaggttctggggatatggtcatgaatatctttgcagggggagggtattgtacctacacagatcatagggtgtcatacattgtccacttgacaggatagttttaaattgctattttaaatggtgtgtgcatttatactgtctctgaaagtgtatgaaaattttaactgttccatatccttgccaacgtgaggattataagactttaagatgttacccaattggatggatgtgttttggtatctcattgagcatctttccatataattattagctgctgaaattgtcttttttatttattgcctgcttctgtccttttcttatttctaaattgttctttgttttgttttcttactcgtttatacataagaaaaaagaaaagaaaaaataattagtagttaattataatatttaacaacatattaattcttataataattaataattttttctttttttttttttgtttagagtcagggtctcaccgtgtcactcaggttggagtgcagtggtgtgatcataactcactgtagccttggcctcctgggcttaaatgttcctcccacctctgcctcctgagtaactgggactacaggcacgtaccaccatgcatggctaaggttttttatttatttattatttattatttattattatttttttttgagacagagtctcagtctgtcgcccaggctggagtgcagtggcttgatctcggctcactgcaggcttcgcctcccgggttcacgccattctcccgcctcagcctcccaagtagctgggactataggtgcccaccaccacgcccaactaatttagtttttgtatttttagtagagacagggtttcactgtgttagccaggatggtctcgatctcctgaccttgtgatctgcccgccttggcctcccaaagtgctgggattrcaggcataagccactgcgcccagcccagtttttcatttttttaaatttgtggaaatggcgtcttgctatttttgcccaggctgatcttgaactcctggtctcaagtgatactcccgcctcagcctccccaaattctgggattacaggtgtaatctaaagtgctcagccataatcccattactaattcttgttggttatttgcattcccatatttttccyagtgtgatttgtctttgcactttattagggttttttttttttttttaagtgcacaaatattttaattcaaagtcggcacgttctgccatttcctacttgaagtaagatatccctcttcatttttaaataaagagcaccattatacattgaaataattttatttgtatctagatatatatgtttctattttttttttgagatgtagcaacaaaacagtctgatttattaggttggtccagttttatataggccgcaattgagaactgtgtaatttaaagagtgatgggtttataaaatgttattgctagcaaaaactttagagatgatctggtctgaaactgatgtccagagagacagggaatggcgattctagaagcgcttgtattgacaaagtgaattgcatacacactgcaatattatcttcgttggctaagggactctgccttaccttgaaaagcatgattataaaaataataactggacatcaattttgctgagaatcttctcttatctctggagtgcatattttctattgtaaggcttttgtcacaaacatacctctactgtgagccaggtcccaaaaggracccttactttagcaaagtcccacaacttttctgtctgggtattcatccacatcactctctgttccaacactgctactcctccaactcactaaacaggttttattttcccaatatcactcgattctcagactcttgaagatcagagataaaattaagtgcatcttttatgcccaaaataagtgtgtcaagattttttcactatttttttcttaaggaagtattgcagaggaacttaagagtgagtgacagttgacaaaaagaaatggttgcctggaaactggcaatttaaataactaggagctgatatgatttaccagcctgataaacagctaggactttaatacaatctaaagggctgctacagatgttggattgagctatttatatgtgttaatctgtctcagtctattttaatacatgcatatatatatgcattttttttttgcagaactggaatataaaagcaaaggctgtatctcttcccctatatgacattaatagaaataatagaaattgccttcaattaaatgaattgttttggtccccttgtttttatatagattttcagtttcaaaggtggctttctcactcagggggaatagatgtcttgtggattgagtgcggagtttgttttgagttctgacactgtaattatatacttagtaattgttaccttgttttttcaggttttatcatttgaaactttactccatttgttgagatggagttgcagatacttttgattcttcacaggaataatgaggtttaataggattggttctgagtgagttagcttaatcaagtagcctgttttactgatgggatcattaagaggctttatcctctcatgggccagttagtttcctggagcaggtgaatgtctttgcagcctccttgatcctcactagacatctttcacatggttcttcgaagagatgatagaaaagctgcagcctatattgtactgtaatcatagtatagtaacccagagttccctcttctggcaggaggtcagtactatcattttgtgtataaataactgatggcatatttgtgaagctgtctgtataaaattccactatctccttgggaatggaatgtgctacatacaacaaactatcatcatgttactagcataaaacttgagataattttgaggataattttgacagtggaaatgttttatgatatgaggaatataaaaatagatcatttaattcacagaatagttgaaggacacagcaaggtaatttttaaattgtttcttgcaattgtttacaattcactgagcgtagtagctatgacttggagaacttctgggaaaggaggacatttttaccacccatgcatgtttgaataaatttcagtctcctaaagctgtgcaccagctctttcatgtatcttcccttctacctctaatcacagtgagaactccctactcctaattcctgtagcacttgtgctgtcccatttttttttttttaaagaaaatagctatcagggctgcagtgtttcacaatttgaggggcagtttgtaacacagaggccctgaatgtcataatgtctcacatatattgagcagtatgctaagtattttaaatatattatcactcatccctagtgaccctgcaagtaactattagagycagcaacttaccagtgaggaaactgaaggtcagaatggtaaataatttgcctgtgaaaatacggcaattggaatttgcattaaggtcagccagactccaaagtcagggttcttttccttgttctgctctctatatatgtttgttattttgtttcttaattgttcatatgcatatgttgtttctcttgtgcttctcatactttagcttagttaagaatcaccatggaaacttgtttaaaatgctgtttctgggcccttgtcctaaagattctgattcagaaggtctcagataagtcctgagtgtctgcatctgcattttctgaggggttcttggactgtactctgagaaatcactggtatgaaatctgggagacaggagctatctgaacaactcccccagctctgaacattcatagcaagcactcaataagtacatgttacattcaagcagagctaacttgctcctgtgcaaaatatagcccacaaggttccatagcatgaacttggattgttcttaacttgaatataaagtttgtgtaagttagaaaagtcaatactaattatagggtgaagttcaaagaacaatatctgatatgattcattttttacaaattggtgtattctggaaatttaggtgtatcctaaattaggtgtattggtgtgttttcacaaggaagtttctgtagacaaaggaacagcattggctagaaaagaaccagagagggacggaattgaagttagttgtaggtataaagtagggttctttggaaggggaggaggagatggagataaagatgggagatgaggttggttcaactcattagtgaaggtaagttctttggaaaggggccaaataaccagtggcctaatcaattgcaagggattctggagaaacctagtagaaaagagggtcacagatgtgttagcrgtgaaaagaattggaccaaacgcacagacaaagcaaggaaagaataaagtgwcaacagcagagatttgctgaaaatgaaagtacactccacggggtgggagtggcctgagcmtaggggctcaagagccctgttatggaattttctggggtcaaataccctctagaggtttcccattggttacttgatatacaccctatgtaaatgaagtagcagcccacgaccagtctgattggttgcagaaagtgaccaatcagaggctgaagtgaagttataaagttctgtacaaatgaagacttggccctctaccagcctgattggttgtgggaggggtccaattagaggtactttcaattcctcatctgccctgcagaaaaaggtggggagggttgcaaagggagtagcctttggtcctttcgttacttgagcatggaaacttggggttttccttttgatttagttctaggaagtcagtgcaaatcggctttagggtccctgcctctagaacctattctcctgcctcagatggagggataaggagtaaacagaatcagtgccaatgtgggtcttggctggggagggtgccatgtacctcacatctttgggcaatggccctggtgacttaagactcatactggtttccttctacattgtgtgggtattttctgttatcacttcttcacctgaggggcacatctgcttgtgcctagagatgtgtcttggctggcttaaaattgtatggactgctagcaacaggtagaacagtgagtaaaacgatcagtgatatccttcccaaaatagagggaccttaaggtctattgaaattcccaagccaatctgttaaaacatattcaagttctgtatagaaagatctatacaatatcmggggaatagacttcatgcttcccttcacatttctataaaatgatacttgtttctaacttacagtttttttttctattcgaatgtttttctttctattaacatccaagtgatttttttatatagctaacacgagtgaaagattaaagtaaacatggtatattcacaagcaaaggatagcacagtatatttccttagagtacacatttgccttctaaaagaaagaaaaagaatgaaaaaaagctttagtaattagatacctgctgtaaccctagtggagtgagaaagatgaatagttgtgctgcaggactctgtgccacagtgagaggcactatgtgtcactgttttctcttgggatgaaatttggcctgaagtaaaataaaatttctgtaatgataataacagccaatgtttttgagcaccttcaccttaccaatgattactttacatttatttccttcaagcctcacaatgacctcataagttaaataattcatgtttaagcaactgaggctcagagaggttaattgacttccagaccgcctagctagtgaaacattttacaagagcactttgctcaacgtggggattatcagatcttcaagagttgagttgcagcattaaagaaatgtgattaaagaaatcacagaattttaaaaaatgtacacaatattgaagcttgaaaaagagaatcatatcactctwaattacaatgatggctaaaggtcttttgtgtttggctagctgatcataacccatgcctccacgcaggtgaggtagtagaccaggggagacgggttcttttcaacatgcttggtcggcagttttctgcagggaaggttatagcgtgtgagttacaaagccctcctgctgcacaggtatcagaggttgtctgttacaagttccttcacttcgactattacttccttttcacaattctattttggacttctgtccagtgtgtatttacaggtagacaaagctttttttctttctttctttctttctttttttttttttaacaacctctttgccatgactgaaaagaagcctgtatatcctgcagtttctgggcattgtgagtctccttttaaactcaaattggtgataatggtgactgtgactmcctattgtccaaggaggggagttgcagatagggccttcaaagatgatccaataaaaatcagtgcagtaagactttttgataaaatgatctttatgatgtagaggcatttggaatatgggttgggtactggataccctggggctaagcccagtgtttaaaaatcaaggcttactacgaaaaggtctgtttttattagtgcaggtactgtagttggcaagatttcttcttatgaaatgcaatatccagcagaccattcctgattatgttatgtatttttagatgttaccattgagttatatttatagtatagactactgaatcttatcttaaatatgcaaaatatatgcataactaacctcccaagctgcgttccctgctctatattacacccaacaatgtagcctgttcttaaatggttctcctaaaagtcttagaatggagcttattatttgcttttaaaatgtaagcacagagactgtgtgttagatgtgtggccttctgggtgacatgttctgctcctagatactctaagggtgaagtcagcaaacctttgkcagtgcaggtggggagtgaaaccaatagtcttgcatagataactccccagagtccagaatgagccaaaagtaattgatatgccagtctttgccagcatgtttggtgaatcagagcagcaggtgtctgttacggtattggggaaggttaaatcaccgactgcattgctgatgtggctcttgcttgtgcccatcagcttcccagtccccagaacccccagagtcctagactctcatcattctattcctcaggacaacataaatattatcaggagcactgtgagcacagtcctgcttctgctacttaaagttgaagggaaacgagtatccttacatctctgtatcccatgttcccctgtcttcatgaataagtggtttgattgttttgaggccaacttgagtttatagagcttgtctaataaaaagatggatgtccttggggaaaaaaagctgaggctaataaggtgagagagaaacggaatcctttcaatgagctaagaaattacttcaattgaaaagcctgggaagtgaccctatcttggtcaacatatttcatgggcaaggtctggggatgtctggtgtcttcccaacccatgaaggcacccatcccacctgggtttgccctttctagatggtggcccatctcaaggatatttttctttctttctctgatccaaatccaaggactatgttctagtccttcagaaatctatactaacaaactggataagtgattctgcctcaaagttgcataactacagaatcattggtcaagttcttactgcctgctcacttattcatcaggaacttattgtgtacctgccatgtatcaggtactctactaggtgtgggggttacaaagatgaatgtagtgcagtccctgaactgaagaacatagtctcatcatggatgaaagtactccactaacataagatacattattattgtctaacatatgtgatgttattatgggtatggtacaagatacagtggaaacagagatgagaaagctgatcttttacttggagtgkttggctaagaattctcatttcagtatggctttaaagaattcaagatacggctgggtgtggtggctcacacctgtaatcccagcactttgtgaggctgaggcaggacgatagggataaattgtttctataaaaaaagtaaaaatgttaggtgggcgtggtggcacacgcctgtagtcccagctactcaggaggctaaggtgggaggatcacttgagcctcggaggttgaagctgcagtgagctgtgatcacgtgagacaaactgataccctatctcaaaaaccaaccaaccagaaaaaccccaagaattcaaggtgggagatgcagaaaaggtaatagtatcctttgcagacagagacacaaaagcatggacacgcgaatgatactgtgcaggaatagtcaggacycatagtcagctgatatgttttagtaaggctccaccagtgcttatacaggtgttcattctgagtagcctgtgcctcggtagtagctaataatgttgaacatcactctaggagtaatcacagattgcctgaaaccataggggttatacatgagggaaagaaggaagaagaaaaagtgggatgaaaggagaccagttatgaaggcacttgaataccaactaaggagctgtgtgtcaccaaattgtagttactgactcattcatttatttatacattccctggaggcagggataccagatagaagactagattaagaatccaatcaagaacaaacaattaattgagctaaggcagtattaattgaaatggaaaggaggattcagataagaaagatatttttaagaggtcagtgttctgactctggtgactgtctatggtaaaagcaagaaacagagaaatgaaatagaatctaaggtttccatattgggtaacagtgtgtcttgtatgtgctcagtaagggttgttgaattgaacacaatgttaagagcggttttctaatgcttttctccaaagttgaaattacagcagaatttcaggttctaaggcatgagagagagagagagagagagagagagagagagagagagagagagagactgaggatctgatgaatctcttggtgttcaacgtgttggcacagtaagcatttcccaccaataaatgatctstatagtgattgtgataaactgagtttttgaaggatactctatggaggaaccatggttaatgtctcaatttgagaagagaaggacctgcagataagtgtgaatggctgtgtagactgaactgtacattttggcttgccctagccatgagaaagatatatcagatttaaatagacaaggtttttgttacctacatagactataaaagcgttctgcttttttagtagcacactatccaaaataatactaattacccaaaagtggggaaaaaagacaactgtaataagctcagagtatagttaaaaaccaaaatgattattgtgatgttcaaggaacatgaagtctaagtcaaatttgaaagcttctgttgtgagttgatttgtagacttttatggcaaattttggattcattgtatcatgttttgtgactgagtttgatctattcaatggcttgacaggtcctttagtaaagaagacctgtatctcaatgagccattactgaagttgtaatgagtagataggcaatgtcttgatgttcatacagctctgctcaagtggtctgtaattccttgcaatgccgcgaagaaagcactgggctaagagttacaggatcagccctccatttgccagccacatatctgtaaacaaatccctgaacctctttacacctcagatgccttgtttgtaaaatgggaataataacagctgattcggtataacccaaagggctgttgtgaagatcagaagagatactccatgtgcaatttctttgtgacatataaagctctgytgacttgtgatgctattactattgagaaggccacataggtggaatggttaaaggacctatggaagaccactacgtatgatgttaaggacagtaataggctgggacagtgaaatgtggtagtgccctctcttttttctggctgcatgggtaagctgagactgcaggatgtcactgtcttgagttgttgctccgtgctacatctgaatatattacagtagtaacgtactttcagagagctgacaaaattgtagtcagagatgatctttttgaagcaaaggactcttagtcttttattgtggatttatgtagctcaagggatatagttaagaaccaaaataaccattcctggatcttaagagacaaaggattcatagcagcagttgtttttgctgcacttgtgtttatctccttaaatgtgcacgaatatgtatatgttttttacagcatggggaaactcatgttaaaattcattgaaaccattaattggaagcagatatacttctattacatgttttgataatctgtatttacaaacaatttgtattatttttctattcttttttgttatctacctacctgaaggcgagtttcctattatttctagttcaggcttataagaatgactaatatatgaggggaacttctaaacagtctattactctgcagcccatttggataaagaagtgtgggaagatttgagaataagttccctattgtcatcaacacatgttgaccactgacccttctttcttttccaggcaacttaaagtggtcttaatttgtataaaattatatatcaattttgtccctaaaaggtgtggatcaggctgctaatctgattttgtgggtgtgaggagagggaagcatatatagcctatgatgtatgaatacatgtgatgtgcacatatgtacagcagatccatatccctgaaacattttaggagaactccttaaatgaccatattctacttgtgcagctgtggcagtaatgataactttggtttaatatggattattggaaatggaaatgcaataaatggaaactagtgtatatcaatatagaaatgcctattcattttcattaaaagagtattcagataacattttcataaatgttagaccaatgtgtcatgtggaggcagttattaaaaagactgaaggcaaggggagttgtttaactttaaaaaagacttgatatttgtaagtcaaatttatatttccatcccagatttactctgcaactcaggtttggagctgtgaagtcaaaacccaactattacatgcccagccacaaatcagcatgtcatggagagttgttgtgtgtgtttttgtggaaataagtgggagaagttaactgctgttgaattgttggaaattattggttaaatttgagttatatttgcaaatacacaagtatcaattgtgcaaagtgacgttaaagatgaaaaagattttttaaaaatcacactaactatgcccttgatggaagttacctttcagagctgcttcacttacattctctaaaggtttcctgttgctttctattcgttattcttaatttaaaatcaaattgtgccattgagaatcaagaatgtatcaagagcatttacaaaatgtttcagactacaatgtaaaaaagtaagaatgactaaatcttgaagctcacacttgtcaatttaggatagtctataaattcaaattcaagtaaatttaacttttattttatttacttttaattatgaagcagatagcatctcagttttctcacctattaggtccagggtgagaggagagagttacaagttatctattagcatggttcttatgaaagtaatatcagatatggtggcatgtctaaaagcactttgtaactataaagaacagtgtgagcaatgtttgtatttattattattattatttttgacacagagatttgcttttgttgcccaggctggagtggagtggcactatcttggcccactgcaacctctgcctcccgggttcaagtgattctcctgcttcagcctcctgaatagctgggattacaggcgcccaccaccatgcctggctaattttttgtatttttagtagagatggggtttcacaatcttggccaggctggtctcaamctcctgacctcaagtgatscacccaccttggtctcccaaagggtgatattattattatagtaaatatcacattgaacaatttttatctaaaactaatgtcagaatgtccatttcttgatataaaaataaaaaagtttgcttttcatttttatctttctgtagagatgttgctttctcattgacacagaaatcaagactgttcagatgatgttaataaaacagcacatcaatataatttttgaaggagatttataaaaatgtacattttaattgtcattaaatcttaatacttattgagcaccaaggatgtgatgagaagtagcctgctaggtctaatgacactacttagctgtttgaataactaaatagcacatttctatttagagaccatataagtattataggtattcttggtgatgttataaagttcttcaaagaaaatatgtatttatatctggctttatatattggggcaaaaatagcaataacactttcaaaatagtgacggaaaaacgagtcacaataaatacgttggattctgaagataaaggagtatataattctcagagttacaacatctgtctataaaaatagtgcaattgggatatactattttagtaagaaactcattaagtgtaattttaaaagctgctgcttttttcttaagtttgacattccagtaaactcttaggaaaatgtccttccagttgcttttcctctaagtgtctagaagtggaagtacattaaaattaaaagcagraagtcccttaaattccttttaagaagtccatcctgttagtctgactcctagaaaggctatggttgctattactttgggctggaacaagattacaaaagacctcaagaagaagtggaaattatcatgggagttttctgtcactcttatagtttatggcctttttgttctttttttagtccattaaacatttctttttgccaagaggtcctatctgtaaaaggaagtctttgataatgatagtttaaaatgctatgtaatgagatacttatatgcaaaaatccaaaaaagcttttttatttctataataatgataatagcaaacaaattatagtgaacagtaaacaataagctaattataattatgtgaattgctttctccctcactgattccttctatacctattattttatttctctgttcacaatattcctgtgctataagggagactgctaaatttgctcttttttagatgaagacttagagacctgtaaggttgatatgactgcctcaaagacacatggtcgcgctgtggctgagtcgacactcaaggccagttctctgtgtttctttttcagtgtgacttgatatagcttgtatcttaaacactgcatttttcttatgttctaggtttctcctctgccaacccctcctggaccattgtcagcagttgaacgacaaaggctgtgaatctgcatcctagtcttagcagtccctctgattctcatgatgagctcacctgcacagcctggtcagtctggttgcttcttaaactgttaatagacttcatgtgaaagatgttgctttgtgttgtttcaaaccaagtaatttaatttatgaaggaacttttttttttttggacaaagattgcttaatgtaacaaattttgaattttgcattcgatagctaattctctattgcttaacccagtttgcttcctggacaactgatttgatttgcattgtagtctgagcatgggactttaattcttctgcttccaaggtaacattcagattgaactttatgaagttatgaatatgaactattatataggaatccatttttcacctgtaatctttctgtcctaacatgtgtctgtatgcttttaaattatactgtggggctttggaagtcagtttgtggattgactccacctccatctctttgacacacaggaaggatatttttcctccccacccttctttgctgccattcctgtttcctatatacatatttaattataatctcagcacctgcttcctcctattccagtgatgtgtgctgctcatgtagtgctgtgatcagcacagccaacacccgttcctccaggaacaggctgtcatttttggagcaaacacaatccaagttttgggaatgatgaagtagggtcagataccacatactagtaacagacaagttttacaagaattttctgcttggatacttacagaagcatttatttctttatagattccttagcatattgatatccttggtttattgaactaagttgaagcttatgtactatcatactcagggcttataagggagacaacttgccaagattttcattccctggattgccacacccaagttagctgtttgggaattccgctgtttcatcaacctttccccacatccccaacaggcctccaacttgtatgctgaatttggaacttgattmtaaatggtgcagtccagaaatccctgagtctttagtcacaaccatgtttgataattggcatgtcactaggttaggcagatggcagttacttacttatgcctgttagctctgagtctttattgcctagtggttctcaaactttagcatgcattgacatcactcggagagtttgttaaaacaagccctattctcakagtttttgatttcgtaagtctagagtggggcacaggaattgtgatttttacaagttcccttgacaatgctgttgctgcttggggaccacactttgggaatcactggtttagcttcttctgcccatttctcaccccatcccctaccagcctctacagacaaccttgtttaagtgtgttctgtgagcggcattgcttattacaattatagtctagtactattattctttctgttgggatgaacttaaattaacatttaccttatataggtgtatattgcattttaaatattatgtatatttatttgtatataaattcagtgtttcaaaattggattgtttaaaagaggcattaatttagaaccactgtggtcaagtatttttttcttgtgataatatttggcagtggatgttggtctaccctgctccccaagaatgttgattttataaaatgaaaatctcacttgaagctgctattttgatgaggaaattcttgcgagttgtgataattgttcagttatgaggagagaaaaggtgatggataaataagacaaccattgaatgaagctcacttgactttagggtcaccaaaatttcctcgtgtacttttttcttataaatcattctgctgtgttgacaataacattatgcagaagtctcaatcaactccatttgggaagtttttatgaatgaaatctgaagttgaggaaagtgatagtaaatgtgccaggtgggtaggagtttcttctatttattgcaagtaaaaaaccatgatcagagacctgaaattcactttgcatggataaaggaaaatgttcctgccacaaacataaaaaaaaattttctcctgttattagcctgcatcttagggtgccgtatatattctgagaaataacctgattgtttgatttagaaaaaaataygtttttcttacatcttttttccccactatctaaaaagagaattaaattggtcttatgcaatcatcatccatttattttgcttttgttccacaaatggctctaaggagttattgtgcaccagaaagaaaaatagactcacttcagtagttccagaaattctttaatagtccatgtttcagactgagtatgtttgtcttcaaaattggttctggtatagtgtgaattcttatttttcccatacattaacatcattcttagaaacgttctccatccatattcaaatatggttgatatgaaatacaaaatgccgccgtcttaatcatgcattcagtcaaacaataagtgctgatttttgtrtataaaatttactagtttttattttaattttgctgcccagttctgttcaaagttagagccttgggtattgcttttgggcactgaggatcctgaatggaggaaagactatctggataagattggcagctagctgctgcagttgagctcttcattcaaaacttattaagcatctaacttgtgccagccagtgtgttacccaatagggacacaacaagcactaaaacatagtttctatccttagggacagcaccctttcatgggagagacaaatagtaatagctttagtccatttagtgtcttaagtattttaataaatttaggaccagaaatttatttcctctgtacagcagtatggatactatttctagtaatgtaatttttatcagaattgccaaatctcagaaggaaggattttaggacttatctagcattttcmaaacatgtcagatagtaaaaatctcctgagacttgttaaaaatacagatttccagactcctccctgaaagagtatcgtgtggtagcctgggggaaggatactggattgtagaatgtatattgctctttgctatgacttggcaaagtgtagaaatgctcttagtccattcaacagcactagygtttcatatttggagactataaacacaaaaacacatcataaagtcttatctcaagtaaatgtttctcttgtgagcaaaactatgctaattcagttattttgttctctgatgatagataaataaaaagctaacactggctaggtgcagtggctcatgcctgtaatcccagcagtttgagaggcctaggtgggaagattgcttgagccccggggttcgagactagcctgggcaatatggtgagatcctatctctacaaaaaattttttaaaaaattgcttggcatggtggtgcatgcctgtagtccctgctacttaggaagctgaggtgggaggattgctcgagcccaggaggtcaaggctgcagtgagtgagccatgatgaagccactgcactgcattctagcctgggccacagagcaagaccctgtctcaaaaaaaaaaaaaaagaaagaaagaaagctaacacagtggaaacctagagaaggcaataatttgaggggaacattctagtggctttgcgtctatctaggccatctcatttttatggggaggtggatggaccaaagagatttttatggagtgcctttattttcctcaaaagaagtttaagcatattttaacccagggcagctttttagtccgatctcaagattatagaaaacctaatttcagcctgaacgtttttaaataaattgggctacatcaaccctaacatgatttttaaatttgatgaatctattttttgtaattaattttgatgaaaacgcatccaaaggaattttccaagcrtagaacacaatgtgcctgttgcccttagaattgtgcaatgctctggccttgtgggcttctaggtaaagtggccaaagctgtgttgcaaagtcctgtaacattagttttcaaagccccttgtataaagctagctcatctctcttttcaccattgtgggaagtactctactcatatgaagtgagaggaccaagctatttatagaagtgaaaggtttatagcaagatcttatattctgttcattttctcgtattctattcattttcttattggcaagtcttgggcaaaaattaattaagagatttatcttcatgcctctgttttgctaaacagctgaattcccccatagaaatgtagagtacatgtaactaatgatcaaaaagttctttgaaatataaattgttatggaaatgctaagtagtataaacaatttgggggcaagcattaataaaagcttctctgcaagcatttttaaagaggactaataaaagcttcatggttcaattaatacagcacaacatcaggttttttagaagcatatgggacccagaaggcctgcccctgtttttaaaatttacgaactctttaatgattcaccatttttactccagtgcattacccacagtggtgccatttagccattaagtaggaaactaaaaccaggacaaagctacaaacaaatatcataatgtccaagtgggtattttttcttcagtttgttcatagtgtgttaccaaaaaaatgaatgttaaatgaaacagagtcttagggcaaatcaaataggttatggcttccctagatgagtatgatcagttagctttttaatgaaatacaggtcaaatcccatgacaagtagctctacataactaaaatattttcaggccactggccaattatctatttcaagtaatattcaagaaaattattccaggataataaaacaaattagttttttgatgtttgttgtagcagaagttgatcacagggtatggtattaatgggaaacactgtatgttaaagttattaactattgttttggatttttttttttttttactactttaacttcacagttaagtgattcattcttttgccatttgtaagtcaaaacttctcaatctgatattcaagtttgaaacataaaccaaatgaagcattttattcattctctagtttttgaaggacagtgctttaataagtgaggcataaaccttttctgaaaatgttcagtataaatttgttttgaacatttatttgtttttatatttgcttttcacaattaattttggtgggtaattcaacttatataattttcattattgtaacactacaaacaaactccataatgcaggccaaacagaaaaggttatttctcgttcatataaagactgagtagagagctgctgtttttctaatggctaccctttgccccggacagcttctaactggtttgtgcttcttcagttcatgtattctaaggtcattgtgcatctccrcatcaagctggtgggagggaaattgaagaggtgcattgagtgtgagaggtttccaaaggtacatcacttttgttcacatttcgttgagtggaatttagccacgtggccatacctaactacaaaggaggctgggaaaagtagtctagcagtactccaggaagaggaggagacaggtttggtgaacagctggcctctctctaccacatttgtcttaaaattttatacctaggactgcagatacggtattgcttaccaagaggtgcagtattttataatgcactcttgatttaaccagtcattaaaaagttaagtaattttcctttgaagagattgaaacacattaaaatcagggcagatcagctcaccaacatttctaagagttgcctaagcctttgtttatgaatcatgcagaatagataatgcccagtgtagctattagaaaattcaagttcctgttagtgggaactctgcagaaaatgggagtaaaatgtatgctgaatattatatgtccttaattagtgtttaaaaataatgtcaatttatctgaaattataattgcacatatgctgaggaaaaagtactttaaactttataatcacaattcttatgtttgttctttattgcattttggggtcacgtttttcaacacctctgtagttttaagtattatgatgaaaatctaggccaaatatacagtggttgataaatacttgttttacactgatcttttcatgaacactactataaaacaatgctagactatatattttcttaagccctgtaagcaaaatcttgctacctctgcaaatacacatgtacagccctttgtttataacattatgtggaacctttatggaggatttttttgtctgtatagattggagtttactcttcagagtacaaaaactctgtgtgtgtgtctgtgtgtgtgtgtgtacgtgtgtggtgcatgtgtgcttgtgttgcagtactataataactctagggaaacacaaaggtatgtggaaccatgtaacctgtacttttacactaaatatcccccaaggctttactttctgtggttttctgcatatttcttaatttttgtcatattttgagaatgtcaacgtatagcagttttctccatttataattcactgcctctaacttgttgtagggttagaaagctaagaattgtgttamataaaattgttaaaagatcacaagttctgaggaggtgcaaatgtcttgttttttttttktkttttktktgtgwgtgtgtgtgtgtgtgtgtgtgyscgcgcatgtgtctctgtgtgtgtgttttaaatagagttttgttcttgttgcccaggctggagtgcaatggcatgatcttggctcactgcaacctccgcctcttgggttcaagcaattcttctgcctcagtctcccaagtaactgggattacaggcatgtggcaccatgcctggcaaattttttgtatttagtagagatggggtttcaccatgttgctcaggctggttttgaactcctgacctcaggtgatccacccacctcggcctcccaaagtgctgggattacaggtatgtgccactgcacccagcctgcaaaagtattttttatgaacaaaatagaagtacttgtttttcttacatactgtaattgcattttaattgtctccttatccactgcacccctcttattttctcggttcttctgtctttagtctatagatttacagaattttgagtttccagcgggtgaggcatcgttatggttttaattttgccatacttttccttgcagttatgatacatcagtttttttttctttttttttaaattatactttaagttgtagggtacatgtgcacaacgtgcatgtttgttacataggtatacatgtgccacgttggtttgctgcacccattaactcatcatttacattagatatttctcctaatgctatccctccccctgtcccccaccgcacgacaggccccggtgtgtgatgttccccgccctatgtccaagtgttcttattgttcagttcccacctatgagtgagaacatgtggtgtttggttttctgtccttgtgatagtttgctgagaatgatggtttccagctgtatccatatccatgcaaaggacatgaactcatcctttttatggctgcatagtattccatggtgtatatttgccacattttcttaatccagtctatcattgatggacatttagattggttccaagtctttgctattgcgaatagtgccgcaataaacatacatgtgcatgtgtctttatagcagcatgatttataatcctttgggtatatactcagtaatgggattgctgggtcaaatggtacttctagttctagatccttgaggaattgccacactgtcttccacaatggttgaactagtttgcactcccaccaacagtgtaaaagtgttcctatttctccacatcctctccagcatttgttgtttcctgactctttaatgattgccattctaactggtgtgagatggtatctcattgtggttttgatttgcatttctctgatgrccagtgatgatgagcattttttcgtgtgtctattggcttcataaaagtcttcttttgagaagtgtctgttcatatcctttgcacactttttgatgggctgggttgttttttttcttgtaaatgtgtttaaattctttgtagatttgtcagacggatagattgcaaattttctcccattctgtaggttgcctgttcactctgataatagtttcttttgctgtgcagaagctcttcagtttaatgagatcccatttgtctattttggcttttgttgttgttgctttcggtgttttagtcatgaagtccttgcccatgcctatgtcctgaatggtattgcctaggttttcttctagggttttttttatggttttaggtctaacatttaagtctttaatccatcttgaattaatttttatataaggtgtaaggaagggatccagtttcagctttctacatatggctagccagttttcccagcaccatttattaaacagggtatcctttcccatttcttgtttttgtcagatttgtcaaagatcagatggttgtagatgtgtggtgttatttctgaagcatctgttctgttccattgttctatatctctgttttggtaccagaaccatgctgttttggttactgttggcttgtagtatagtttgaagtcaggtagcgtgatgcctccagctttgttcttttggcttaggattgtcttggcaatgcgggctcttttttggttccatacgaactttaaagtagtttcttccaattctgtgaagaaagtcattggtagcttgatggggatggcattgagtgtataaattaccttgggcagtatagctatttccaagatattgattcttcctatccatgagcatggaatattcttccatttgtttgtatcctcttttatttcattgagcagtggtttgtagttctccttgaagaggtcctcacatcccttgtaagttgcattcctaggtattttattctctttgaagcaattgtgaatgggagttcactcatgacttgactctctgtttgtctgttattggtgtataggaatgctggtgatttttgcccattgattttgtatcctgagactttgctgaagttgcttatcagcttaaggagattttgggctgagatgatggggttttctaaatatacaatcatgtcatctgcaaacagggacaatttgacttcctcttttcctaattgaataccctttatttctttctcttgcctgattgcgctggccagaacttccaacagtatgttgaataggagtggtgagagagggcatccctgtcttgtgccagttttcaaagggaatgcttccagtttttgcccattcagtatgatattggctgtgggtttgtcataaataggccttattattttgagatatgttccatcgatacctagtttattgagaatttttagcatgaagggctgttgaattttgtctaaggccttttctgcatctattgagataatcatttaatttttgtcattggttctgtttatgtgatggattatgtttattgatttccgtatgttgaaccagccttgcatcccagggatgaagccaacttgttcgtggtggataagcattttgatgtgctgctggatttggtttgccagtattttgttgaggacttttgcatcgatgttcatcagggatattggtctaaaattctctttttgttgcgtctctgacaggctttggtatcaggatgatgctggccttataaaatgagttagggaggattccttgtttttctattgatgggaatagtttcagaaggaatggtaccagttcctctttgtacttctggtagaattcggctgtgaattcgtctggttctggactttttttggttggtaggctgttaattattgcytcaatttcagagcctgttattggtctattcagaggttcaacttcttccttgtttagtcttgggagggtgtatgtgtctaggaatttatccatttcttttagattttctagtttatttgcatagcggtttttatagtattctattctctgatggtagtttgtatttccgtgggatcggtggtgatatccccttaatcatttttgattgcgtctatttgattcttctctctttccttctttattagtcttgctagcagtctaccaattttgttgatcttttcaaaaaaccagctcctggattcattgatttttttgaagggttttttatgtctctatctccttcagttctgctctgatcttagttatttcttgccttctgctaccttttcaatttgtttgctcttgcttctctagttcgtttaactgtgatgttacggtgttgattttagatctttcttgctttcttttgtgggcatttagtgttataaatttccctctacacactgctttaaatgtgtcccagagattctggtacattgtgtctttgttctcactggtttcaaagaacatctttatttctgccttcattttgttatttacccagtagtcattcaggagcaggttgttcagtttccctgtagttgtgcagttttgagtgagtttcttaatcctgagttctaatttgattgcactgtggtctgagagacagtttgttataatttctcttcttttacatttgctgaggagtgctttacttccaactgtgtggtcagttttggagtaagtgcgatgtggtgttgagaagaatgtatattctgttgatttggggtggagagttctctagctgtctattaggtctgcttggtgcagagctgagttcaagtcctggatatccttgttaactttctgtctcgttgatctgtctaatattaacagtggggtgttaaagtctcccattattattgtgagggagtccaagtctctttgtaggtctctaaggacttgctttatgaatctgggtgctcctctattgggtgcatttatatttagtatggttagctcttcttgttgaattgatccctttaccattatgtaatggcctgctttgtctcttttgatctttgttggtttaaagtctgttttatcagagactaggattgcaacccctgttttctttttgctttccatttgcttggtagatcttcctccatccctttattttgagcctatgtgtgtctctgcacgtcagatgggtctcctgaatacatcacactgatgggtcttgactctttatccaatttgccagtgtgtgtcttttaattggggcatttagcccatttacatttaaggttaatattgttatgtgtgtatttgatcctgtcattatgatgttagctggttattttgccagttagttgatgcagtttcttcctagcattgacggtctttacaatttggcatgtttttgcagtggctggtaccggtttttcctttccgtgtttagtgcttccttcaggagctcttgtaaggtaggccaggtggtgacagaatctctcagcatttgcttgtctgtaaaggattttatttctccttcacttagtttggctggatatgaaattctgggttgaaaattcttttctttaagaatgttgaattttggcccccactctcttctggcttgtagggtttctgtagagagatcagctgttagtctgatgggcttcccttcgtgagtgatctgacctttctttctggctgcccttaacagtttttccttcgtttcaaccttggtgaatctgacaattatgtgtcttgggtttgctcttctcgaggaggagtatctttgtgatgttctccgtatttcctgaatttgaatgttggcctgtcttgttagtttggggaagttctcctcgataatatcctgaagagtgttttccaactcatttccattctccccatcactttcaggtacaccaatcagatgtagatttggtcttttcgcatagtcccatatttcttggaggctttgtttgtttctttttactctttttttctgtaaatttgtcttgttgctttatttcattaatttgatcttcaatcactgataccttttcttccacttgatcgaatcggctattgaagcttgtgcatgcgtcatgtagttctcattccatggttttcagctccatcaggtcatttaaggtcttctctacactgtttattctagtgagccatttgtctaatcttttttcatggtttttagcttccttgcgatgggttcgaacatcctcctttagcttggagaagtttgttattactgaccttctgaagcctgcttctgtcagctcatcaaagtcattctccgtccagctttgttccattgctggcgaggagctgcgatcctttggaggagaagaggmgytctggattttagaattttcaacttttctgctctggtttctccctatctttgtggttttatctacctttggtctttgatgttggtgacctacagatgggattttggtgtagatgtcctttctgttgatgttgatgctattcctttctgtttgttagttttccttctaacaatcaggaccctcagctgcaggtctgttggaggttgctggaggtcctctccagacgccgtttgcctgggtatcaccagtggaggctgcagaacagcaaatattgctgcctgatccttyctctggaaacttcatcccagatgggcacctgcctgtatgaggtgtcattctgcccctgctgggagatgtctcccagttaggctacatggcggccagggacccacttgaggaggcagtctgtccgttctccaatctcaaacaccatgctgggagaactactgctctcttcaggcctgtcagaaggggacgtttaagtctgcagaagtttctattgctttttgttcagctataccctgcccctagaggtggagtctacagaggcagcgggccttgctgagctgyggtgggctccacctaattctagcttcctgagcactttgtttatctactcaagcgtcagcagtggcggacacccctcccccctgccaggctgctgccttgcaggtccatctcakattgccacgctagcagtgagcaaggttctgtgggtgtgggacctgccaagccaggagtgggatataatcttttggtgtgccatttgctaagactattggaaaaacgcagtatttggttgggtggtgtcccgtttttccaggtaccatctgtcatggcttcccttggctaggaaagggaattccccaactccttgcacttcccaggtgaggtgatgccctgccctgcttcagctcaccctccatgggctgtaccctctgtccaaccagtcccagtgaggtgaaccaggcatctcagttggaaatgcagaaatctcctgtcttctgtgttgatcacgatgggagctgcagactggagctgttcctatttggccatcttggaayggaccagtccatagttttataatgcatgcctatgtgttgatttgtgttgctttggagttgctttaatatccaaatgaaagactcatgaccatattattggtgaacttttaaaaaatattgtattgatttataggaaattgataagctttgaggtaatctgtaaaattatttttaaccccccccccctttttttagaataacttcctggcacttgattatataaggctcttgctgcttatgatagatggttgctcctcacatatcattgcataattaaccttttctcccaggctcttaatgtccaagaaaatgttctcttcataccagtaatgtagttccactggaaagtgttctgggtgagctggggatttttcctttggagctggaatttgccctagtaattctgccttctttggaattctgtgagttctgtgagagggcagataatcatagtggtgtatgaccaagcactcaccttttatctttaactctcagaagaaattgtttttcagaaagaaatgtcaaaatgacattattcatgagaaaaactagtcatgagttttggactctctaggaatgtaaacatgtttaataaaagctggtgacagtttttcggtctgctgttactggaaagcctgcttgatttccttccctgtgtttttctggtcttgagatctccagtgctttctgaagatccaggaatgccgtacaaatgggaaaagccagactgttatcttgaacctctgtttttgaaatctctgtctgataaggaaaaaaatattgcaagtcattgtagttacttgtttggtttgtcactggaattccaaayatttgcttggtggttcatggacatgtaaattttgggatatgttactattgtttagggtatactgtctgtaaaataagttattaacccagtgactgttaactagatcttccaaaagccctgtctcctatcattttatgtgtattgaaaaattattataattagagatttttttaaactcttagaaaatgaaagtatacagctatgaaaattctgtttgggtaattttttaaaaaatttattttcagttcagaggtacatgtgcagatttgttatacaggtaaactgtgtgtcacagggctttggtgtacagattatttcatcatgtttggrtaatttttatgttattttttaatgcatttttatccttttgtctgtattattgtgcttccttttttattaaagaagagttggatgtatcttactttggctttatgtttaaagtgaaacagtaaattgaaagattttaacaggtcrtggtatgtcaatgaaagaacctagaaattagcagaaaaatgcaggaagccaactatagatattggaaaaataatacataccataacttgagttaggtaatgtacactatcgagtctttgaatttcaataaagtatgtcaaagtagacattgtatgtcattttcccttctgttgggagaactgataatccgcctacccatctgccttcctacctttcttagttttctttctttttcttttattctgcctaagtccagaaaagatttggggtctatataagtaagttatggaaaataaaatacgtgaggaggaagggaaatgaagggaaattgggtacaccctgttagtacctgcatttaaattctgtgaagttgcttgaagacggatggatctgtgtctgagcttcctgattagsaagtctgttgtctatggtgcgattaatmtcttctcagcctaactctgatatagtcactgccctgtataagaaatgtcagtggstctctatcacatctatttaaggtatataagaacccgtacccttttcaggcttatcttatttttctcctcaatgaaccccactctkttcaacatgtagagctgcttaccttccccaggtccagttttcttgcttggaggcctttgaatgacccttcctcaccactgggagtgtcctgtttacttatcttcaacacccagctcctactccattcttctgtgaggccttcctgggtgacgctgacatttgttacctctctcagttctggaacttaccttagtactggggttgtcttctctaataggcttagctttttgagggcaagggacatctaagtacattttgtggggtgtatatagagtgaagcagttggcagctgtatttatggttgctctcttagttaagtaatatactgcccagcacacaaaaggagccaaataagtgaagaataaagggcactttgtgaggaggctgattatagtggtgctaggggcatggaattggggaggagggaagcagttgaatatacctgagcaaaaccaaactgtttcatatgtgtcatgaatcatatcccttttctttttgcttattcatttgttgactttcggttcttttcacctctagtgctatccactgaacttcctccatccccctacctccccttccctcccgttccctcctccacctcccctcccctcccctctcctctttgacagagtcttgctctgtcacccaggctggagtgcagtggcacaatcttggcttactggaacctccacctccctagttcaagcarttcccttgcctcagcatcccgagtagctgggattacaggcacatgccaccatgctggctaattgttttgtatttttagtagagacagggtttcacyatgttggccagacttgtctcgaacttctgacctcaggcaatctgcaygccttgggctcccaaagtgctgggatgayaggcgtgagccactgcacccggcccccctctttctaaggtggcttatctattcattgaacaacaaacattgcaatagggtagtcattgtttgcaagacttgtggtttcatactgagttctctaaatgtggggaagttgctaagtttggctcttcttcagctagcacagcggtagaagcagacctaccaccctctttccttttagtaacttgaacttctccctgtttcaatgcttataaaccacctctctcccaaaacaaatatgtattgtggttaagaatagtggaaagagtgamatgatttttaattgtggttgagcaggaaattgttttaagttagtttagaattcattgatccaacattctttatacttttaaaaagtaatacagttttgcatactgtataattagcagtaacttttaaatatactacgtttctgaggaccttcagtaaaatacatagaaaggaaaacawccggcttaaaatttgtgacttttcaatctgtatacattttcagttcctcttatttaaagtgatagactaataaatattttaatataatggttgaagtctttattaagattaaattaggatcttaractttctgtgtgtctccattaaagatgtgtttttggcttcattatttgacagtgttgtgktatggcatttaatggagaacaagatctcttactttggaatgtatctggtcaaatggagttcctttcatatttgcccaggaagcttatttttctaaagattatggaaataacagatgtggaacaagcaagcactgcatgtctttcattcagagttctctgaggaaccaccttgggtaggcttttgtttgtcacacacatagcaagtatgtctttaccctgactgatgcaatagtccagcctcctgtggggtatcatccactaacaataatgccataacccattagttgattgcaaactctctgaatccatagggacttgccccagtccaaatgagtgactaattcttaaactacaaggtaaagctgaggtcctaagggaggagggacatgttaaggtttgactgtttattttgcttgttattactgcaggatcattaaagaaatgtttatatcctgttggggttctatgttcttaaccactatataaggatgaataagctttgttttttttgcttctacctctcttatatttctttccattctctaccctccctctcctaaggaaaaatggtgttcacactcattgggtctaaataaacccaaacgtcttttctttgaatattttattaccttatctgtttatctattaatgagaaattatacaaatgcatatttgaagttcttagtaaaagcccaaggacttaaacgcagctctggaaacacctgtcatctatcttttatttagtaaatctccctttgtcccagattcctcatttggaaaatatgtcatgaatttgttatgttggtatcataaaagatgtaattgtacaagagatagtaaagtatcacatgttcatttagaatgatcacacataaatatgtgcttttttctctcaaccgtgacctgtaactatccttttttgaatgtcacaaaaatctcatgtctataagcctctccacactgatgagattgaggcctaaaaccatcatctcccagctctgtcacaatttccagatttgtctctgtctttaggtttgctcacttttgagcacatagaattatgccatccttttcaaattacatgtcagctccttactttatcctacccccagtagtgagcgccttagttgccttgcttcatcttttgatgtgtttttacmctgtttgtcatgccagcatttcttgtgagcaccctccccaagacacayacacacacacacacacacacacacacacacacacacacacacacaccacattyttaacctatggacatttgctgctgtaaattcattatatatggtgcattgaaaatgtttgctctgtgtttcttyctggaccttgtgctagcaactttgttttgtcatttttgtcaagtgattttcttttttcttttttttttccaaatcagctaagtcactgataagattgatgagtatgagagattgatcattttacaatttccatcctgcggccatatgagaggttgtatttggtacctagattagatcaaagagtgtcagaactcaatgggctgtataacatgtggcaggtagcagagtaaattggaaagaataagaataccagaaggagccaagaaatacctgttggaaaccccaatctgccctaactaactttgggcctttgagaacaagttactttatctctctggatatcagttttctatcttgtattagtttcctgtggctgctgtaacaaattaccacaaacttggtggcctaaaacaaaggaaatgtattttctcacagttccagaagccagaagtccaaaatcagtttcactgggctgaaatgaaggtgtcagtaggaccttgctccccacaaagactccaggggacaatctgtttcttatctcttctagcatctggtggctgctggcattctttggtttgtgactgtatcactccagtctttgcctttggggtcacattgccttcttttgcrtgtgtgtcaaatctcctcctccttcactcttatatgcatatgtgtgattgtattttgggaccacctggataatctgagataatctccccatctcagaacctttaagcatgtctgggaagtccttttttttccctaagaggtaacattcacaagttctagggataaggatgtgggtatcttttgggaggttgttattcagctactaaacgcctgaaataatatctgaagtcatgctggcttggcttgtaattgctattcatttcattcatttgttcattcaccaracttttatttcatgcctaatatgtgccagacactgttctaggcaataggaataacccactgatcatgcctttagtaaattcattatattgttggtgagattaccatacagaataaatgctaaaataaaggtaaaagagacaatttagactattggattaattctttgtatgtctccttttgcacagttctggagcacaagccaccagcatgcctcagtacttgtaaatcatttcagtaactayaaggattatgtgtagtgtagcctgtggaccagaaagtattttacagaggtcaaagcaygcatcagcttaaattcaattcaggtgtatatattgagtacaaaaataaagtttagacctccaccacaattatacaatttttgtcaaccctggctgcacatcagcatcaatagcaggcctttacaaactactcatacctgtccccctaccccaccttgtgcttggttctaggtggagcccaggggtcctttaaaaaaatcttattagcrgattcttacatgctgagggcattgaacagagagaacctgtggtctgaagaataggaaaaccaaatacaagggtactgatacaaatgcaagtcaaaatactgtaagttttctcaggatatatagaaacaaaatagtttggatactcagaggaaaatgagatcacatctggctcaagggaaatttgaagacggaagtgtttgaaatatccttgatggatgtgtaaaatttcaacaggcattgattaggggagggtggaggaaagggaatccacagaggtctggagtaggggaaaaggtgtgtgtcatggctggcagcagggcccaggagccaagatctaggcaccaattctctctccttttgctgagactttctggcctggaaacttgaagagcttgagaattctaaatttaaatctggtcctctaggtcattgtgaaggtatattttttcaaggcaggagggtaaaatgtattttatttgacaggtaataggttgatwtatactttttaaaaatttagaaacatgatttctgggcttccatttgtactcttgctctatgtcgtacaagtattaggagcaggcttctgtgggggaaataaaaatggagaggaatgttttaaagtgtttcaaaagaagaatagccaatatgtgatgactgacgggaaaacagacaaacatagtgggaggtaacaaaggtaatttaaaagttcaagaatgacagtagaattagtgggagtgagacatattgatggaaaagatagctagcatttgttgagtttttctcacaagccaggggctttcactgcattttctttatgtcartgaattattttcataagccttgaggtaggtactattcttatcccattttacagacgggaaattgagactttgaggggttagttatcttgctctatcaaggtcttacagtaaatctagctcttggatccaggtaccttaattccagagtttgtattgttaaccacagttctgctagttgtcaggagattggcttgagaataaggctgatgaagagtagttgaattcaaagacaggaatttaagaatcatcagaagagaggtcacagtcaaaaacttgggtagtcagcaagcatcascttatcaattaaaaaacggaagaaagagagaagagtagagggacaagactaaatgtcactgaagctttcagggcagtatcttatacctgtttatggctgccagtcacttaacatatgatttttttttttttttgagacggagtctcactctgttgcccgtgctggagtgcagtggcgcaatctcggctcactgcaagctccgcctcctgggttcacgccattctcctgcctcagcttcccgagtagctgggactacaggygcctgccaccacacccggctaattttttgtatttttagtagagacrgggtttcaccgtgttagccaggatggtcttgatctyctgacctcgtgatccrcccgcctyggcctcccaaagtgctgggattacaggcgtgagccacggcgcccagccatggtttgtttttttaaaaaaagcccttgaatatttaagtaagcaaatgaaccaatccctcaatcgtgaatttttctacctgtgcttcagattctacatacataataattacgatggctagaaggagacaaatctaaagaatttcctcaacttttgctgcctgtttttgtgaccctgattcagtttcaaatccttggggatcttccttggattccattttttcaccttactccatcttttcccccacagaagatagctgcttttggaaggttatcctagcataagaagattggcagaacacttcactacttttgtcattttaaacagtttctttaatttaaatttttcatttttctgtagagatgggggtctcgctatgttgcctaggctgatctcaaaatcttggcctcaagagatcctcctgctttggcctcccaaagtgttgtgattacagacatgggccatcacacctggccattttaaacagtttgtaaactaaggtattaaagtaacaatacataaayggtaaagtatcctgggctgttgagtgtctttctcctcccctcctcttcgagtgccctgaaacttttttcattctaccattctcacaatgagtatgcataaaaagtcactrttaaataatccaggaaaataaaactattgcctttaaaatatataaattatacatttttttgttacctgttattgcatgttgagtattcctcatctgacatgcttgggaccagaagtttttagattttgtatttgtttggattttggaatatttgcatataaataatgagctattggccgggcgcggcagctcatgcctgtaatcctagcactttgggaggctgaggcaggcagatcacctgaggttgggtgttcgagacccgcctgaccaacatggagaaaccccgtctctactaaaaatacgaagttagctgagcgttgcggcacatgcctgtaattccagctctacttgggaggctgaggcaggagaattgcttgaacccaggagggtgaggttgcggtgagccaagatctctccatagcactccagcatgggcaacaagagtgaaactccatctcaaataaataaaaaaataaataatgagctatcttggggatgagacccaagtctaaacatgaaattaatttatgtttcatacataccatatgcaaatagcctgaaggtaattttattcaatattttaaataattttgtgcacgaaacaaaatttgtatacctgaggtaagrtgaggaatttccacgtgtggcatcatgttggtgttcaaaaagtttcagattttggaatattttggatttcagattttcaraataggtatattcaacttatattaaccagatcaaatgttctatgcttgtcttgttctcttgaccctcggattatttcacaatcagaatccagcatattcatttgaaaggtgtagggtattgaataaaaaggatttcagaacagctatatagttgtgtcagatattttaatattatagtactgtatttttgtgctattgtatcagagtcacatttttattaaaatttatgatttacacctaatctcttaaaaaatactgcagagcttgccttagtctgtatcctgcatgtcctatttctttttctagtactgtaattgagttgctatgtaaaatgtggtctgcctatgtaattcttcccacctaactttattaggaaaattaatagaatagcaatatcacaaaagtgtttgattagaatcatgggaaatgaaactaatttgcaataaagcccaagactggctttcaaagcaagtgatttttatggttagaagtcaaacaactttacttacagacagtgatcgaggcaaaaaaagtccatttgttatttgaaagacatcaggaaagccactgattctcagtttggactatacattaaaataacctggagaactaaaaatgaaaaccaaaagtctgaaccaggaccaccacctcaatgatactgacttaatttgacttttatgaggcttaggcgtgagtattcgttaaacctccaaggtaattataatgtgcaactaatgttgaggactgctattaaagcaagcatcaggaaagcacaaagaacaggataaagtaaataaatataaaatccttaccatttaggagatgacatgtcctttctaaaagaggaaatattgtctattaagttatgaaaactaaacttttagttctattttgaaaagagacaaattaatctcatttaaatattgttacaagcatagataagagtacatatctatactttttaaaaagccccttttttttctctttgtatttaaactcacttatcttcttatattcaagattattaaatctcagctatgggcctcgttttcccctaccttcatattgttccaacttatgaattgaaactgtacattaatttccaaatgaataatttaaaatcaatggagtaaatgggacacttgcagtcaatgaaaaaatccagcgattatctcgggcattttttttctccataaagaaagcatgattactcttacaaaatggtattttgtcacttcgtgcaaagtatcttgatcattctgggcctatgttgctttttctgtaaaactgggatatcacatattgctgaattgcagtgaccatttattgagtgttcattgtatttcaggttctaagtgtattaagtactttatatgtgatatctcattttatcagattgaaaacactatggagtaaggactrttttctaaaatcctattttgaagatggaaaaccaagccttagagacttgcctagctaggttaacatgtctaaagttatatttcttgttatcgactgggccaggatctgaatttaggcagtccaacacggtagccactggtaacaaggtagcgctaaccctctgtgaagacaaatttttctgtttagctgactggttaagactaaaattaaagcttgtaccttctttacagggacgttttccaaaaagacagtcttgatatttcccaactgagcaacaggtttttctgttgaagctaacaaggaacaggtgcactgctggtgttggcatgtgccgctggcaccggacttgtggtaggatggtgctttctggtgctggttgggttttaaggaaggagcatgacactcaaaaattcccaaagcccataagactctgccccactcttcactaccaaatcttagggaaaacttcgggtagggagaaaatagaagagagctcttctggattaacatgaaktggcttgaggaatgtcaggagtgggaagccaggaaaatttgtggtcagaagaccttaattaaattcctggctctgctcttcatgccctgaaagtcactcaacttttctgaatctcagttttctcaactttaaaatagaaatgatgatgtggtaattgaattccatacttcaaaggacagatgatcaaataagataatgtactgtaaaaactctaaataaagcataaggtggttttgaaaactgttaatgttaataaaagcagatttttattttctaattggaagwctttatctctttaacatgcagaataaaagtaaaacaatatttactctacagaactacttaaattagaatgcctgtgtggtatacttggactgacttttacttccccaaagtgttcaaaacccctaggcatttaagcaactttcagtgtattagttactgcctaatgggcaaaccctatgatcttttctcagtcttcatagaattatagcagtaataatttattattcaataagtgtacattgagtacctactatgtccctggaatgggtttaagtcattggaaataacagtcagtgaaaataaaggcgggcaaaaatgaaattgtctattaagcacctaatgtggacaaagtgttacatataatctcattgaatcttcacagcaatcctgtgacataggttttactggcattacttataaatgaggatactgagggtcagagagtttaagaggcatgtctggcacatcctagcaaggagaaaagtagaactgggattaaaaccctattctatcttcttttctagcaagtggcttttcttgtgaccatttatttgttaattcatttattcatacttcactcagtagtcgtttgactttcttctttctatgaacatcacagatattttcttagccasctgtggttaaaaccatggcaccatctttaaaactcttaactctattcccctccacatcaaatctgttccaatcttgacaaaccttgtcttccatttttgttgccaaccttttgcacttattactccttgctgctactattctactagacttagaactagtctactttccctctcccctccattcagcctaatccatacagtgttgcctagtgaatcttactaaagcacaaatctaattatgtaatttctcgaaaatcttccatggcttgccatggcctacagaaattgtcagtaatcacaaggcattcctactgtcaagggtatagggcaaaccatattttcagccttcttcagtgtgcttcttcctgtgcacaaaattcatgtttcccaggcttgtctgataagaatcacctggggctaaaataattcatagattcagtggtattcccatcaaaataccattgacattcttcacagaattagaaaaaactattttaaatttcatatggaatcaaagaagaccctgtgcagccaagacaatcttaagcaaaaagaacaaagctggaggcatcatgctacctgatttcaaactatactacaagtctacagtaaccaaaacagcatggtactggtaccaagacagacatatagaccaatggagcagaacagaggcctcagaaatagcaccacacatctacaaccatctgatctttgacaaaactgacaaaaacaagcaatgaggaaaggatttcctgttaaataaatggcgttgggaaaactggctagctatatgcagaaaattgaaactggaccccttccttacaccttatacaaaaattaattcaagatggattaaagacttaaatgtaaaacctcacaccataaaaaccctagaagaaaacctaggcagtttcattcaggacrtaggcatgagcaaagacttcatgacaaaaacgccaaaagcaattgcaacaaaagccaaaattgacaaatgggatctaattaaactaaagagcttctgcacagcaaaagaaactatcagagtgaacaggcaacttacagaatgggagaaaatttttgcaatctacccatctgacaaaggtctaatatccagaatttacagggaacttaaacatatttacaagaaaaagacaaccctatcaaaaagtgggcaaaggatatgaacagacrcttctcaaaagaagacgtttacatagccagcgaacatgtgaaaaaatctcaacatcactgatcatcagagaaatgcaaatcaaaaccacaatgagatactatctcatgccagttagaatggcgattattaaaaagtcaggaaacaatagatgctggcgaggctttggagaaataggaatgcttttacactgttggtggggatgaaaattagttcaaccattgtggaagacagtatggcaattcctcaaggatctagaatcagaaataccatttgacccagcaatcccattactgggtatatgcccaaaggaatataaatcattctgctataaagacaaatgtacatgtatgtttattgcagcactatttacaatagcaaagacatggaaccaacycaaatgcccatcaatgatagactggctaaagaaaatgtggtacatatacaccatggaatactgtgcatccataaaaaggaatgagatcatgtcctttgcagggacacggatgaagctggaagccatcatcctcagcaaactaacacaggaacagaaaaccaaacaccgcatgttctcactcgtaagcaggagttgaacattgagaacacatcacacagagaggggaacaacacactccagggcctgttgaggggtggggggtgaggggagggaatttagaggacaggtcaataggtgcagcaaaccaccatggcacatatatacctatgtgacaaacctgcacattctgtacatgtatcctgtttttgtttgtttgtttgtttgttttagaagaaataaagaaaaaaaagaatcacgtgkggcttattagtatgtgagttcccagaccccacttgaccatactgagccagaatctgcaaggatttacagagccttgtggggcatggtaagactggtgttcctcccaaagacccagaacacaggtgcatgcctgtgattatcctaggtctcttgctagcactgtgtgttgaggtagtcagccagtgtcatctgatgtgatgacactttgtcatatctgagacctcccagtcaccctttctcacgcattactgaggtgcaaaccaagtgtcaaaaaacccaaagacacattaattaaattgaatcctccaaagaagtgtttttctcacatttttaagagcatgagatatttttatgtgagcacaatgtgaaacacataaaaagatttaacttgtaaataacttgtgtgtgkgtgtgtgtgtgtgtgtgtgtgtgtgtgtacgtttgagacagagttttgctcttgttgcccaggctggagtacagtggcacgatctcagctcactgcaacctctgcctcccgggttcaagcaattcttctgcctcaacctcccaactagctgggattacaggtgcctgccaccatgcctggcaaattattttttgtatttttagtagagatggggtttcaccatgttggccaggctggtctcaaaactcctgacctcagttgtcccaccaatcttaccctcgcaaagtgctgggattacaggcgtgagccaccacgcccggccataaataacttgtttagctcatatgtgattgtccaattttgggcatgtatacatakatacatatacatatataaatgtatataaataaatatgtgtatatgtgtacataaatgattatgggcatatgtatttgtgtgtttgaatatatgtgcttagggatagggacacacatgtacatgcatagatgacttgccttcgccaaaatttatacagatgtttctcaacttacaatggggctatatcctgataaacccattataagtcaaaaaattgtaattataaactggcttataaaaagaccacccaatattgcaagataaaaggcattaactgtaagattatgatgcaagaggaaaataatgaccagaaaataagttggagtggaaaacgtttctctaaaactttctacgctatcattgaaatagctattaaataatatattgaaataaagattgttgcttttctctttttattttcccaattttcactcttattaagtaaaattactcagcttttaaaatcacttgtatcatctcactgtgtatttacagattttttgcttctcagaaatttctgtatgtcccaaattccttttaaatatttaaatattatgcatgttttacctttgtaaactcctacctttgtaaaacatgcggaatattatttatctcatggatttcacccactgtcaaaagtctacttccctatcaccaataaatacttgaatactattaagtgataattttttagaatcacagggatcaaactatagttgacttttgaacaacacagggattaagggtgctatcaccacccccagtggaaaattcatgtgtaactttttgactccctgagaacttaaccattaataccctactgttgactggaagccttactgataacataaaccattgattaacacattattttatgttgtatgtattatatactgtattcttacaataaagtaagctatacaaaaaaattaagaaaatcataaggaaggaaagatatattgccatttattagctgtgtgggtgaagaaaagttacttaacttgactacgctcagtttattcattaaataatctttgcagacctggtaagcactggatgaaataatgtaataagacaaaaatgtgaagattttctccatagtcttatcactctgtatcataatttaatcatgtttctttacacggtttctcaattcctgagagaatgattttagacaaacccagagaactctctttgaatatcattctttgtttcaaatgtatttccttgtggcaggaaacgataaacacacatggcacagacagctagtgactgaaggggaagttaatggtgtttgtttttcctccagaattagtagttcagaaattaaaaataaaaatgtggcttgccaagtttgtaaactacacagaattctttgattacaagatgacaatgaatttaatttttttgacatttgtatttctttgatacttatgaattgaaatgttttgaaaacttatgaatttgcagctttacattttataaactataatgattaaaatatccaaatccattaatttcttccttgccctgtaaacttgaaaactgagaaaagatttagagtaaagcattttgaaatcattgacaagcacaaatactgttagattctatgtcaagattgtattgctgcccttgaggagacattatacgtgctttctaagctatgacgagaagacataaacaaggtctttccccagctatgtgctagaaaaaaacccttaattgtgattgtacagtattgcttgatgcaaaagtcaactcatttttcaccagggattcctgtccattcctggaaatgaggtaggatgaacccggccggrgggcrggggggtgtcacagtagaaggtggtggtttaggaaaatctacaagtgacggtaaatactattctagaaagttaatttttttttatttcagggagcaaatcctttatatttggcaggtagaatgcaacttcttggtagtgtctttcatttaattaaaattaagattgatgtggcttgctgctgctgcgtaatatcattctgacttttgcatagctattgcatttgtaaatattcaaatgcactttgttatggataaaagggagttccttgggtagatgtttaacttttattgcaaaacctcttgtgctcacttacgttgccagatttggtagtagtcatgcaccctgggaaaatcactggcaaagcagtggagtggaaaggaatcatgggtatttactgtgaggagaagggaaggtaaagrtgttgtaggggttatatcatttcactcaggaatttgcttttggaaatgtcattaaggatatagtatttggggatggtaggtatttttagaatgtttctaagtaaaatcacgatttttcttttaatgcactgtgaagaaatcatctagtccagtgctcatgaaatcaatttagtaggttgcaattcaacaatggaatagaataggctaaaatacaacatgccagaatgcacacacgttgtaacatttagtgttaatttatgagactgcatgagttttatatagataagcatgtttctatatatatgtgcattgtatttaatatgtatttctcagtatgagtagctgttgaaaaagcttaaaagccactgattgactttttctcccattttacagatgaggaaactgaaagaggctgattctcattttatttgagtgggtctccttgaggcagcttatctgtcatcaggggtctcttgttataatctgtttaattacctatgcatcttttacaatttttcacccttgctcaaaaattgctatatttttgtgaccagaaattggatcaaagatgctgattctggggagataatctttgctgagtctctgagcaccatgttggatgggtagttggtgcttgtaataccaaggggaaaagaacagaatatttatagctctctgtagaggtaagatcttaggtaaagtcagatgaaaaggtggaacaataatctaatacatttcatcaatagatacaacaaatcaccattagcttctaccatttgtttcagttcagttcaacaaatatttattgagctcctacttagtatcaggtattttaaaagctagccacttacttccttctttatgataaattaattagtcaaacaattaaattattctctccctttgcttgtggtgtacagggagatttactgaagtaaaagggggtttcgtttgtcaaagatgaaagagatgtagcgccrtgctwtataacacaatatgctacttggaaatctgttatgccttatctagaaatgttcctaatatcttgaactccacctttcactcattaggaagtcctgcaatataaagctcacctataatattttctctatatttgctctcataacacattgatttatattgaactttctccttgttgctatttatacagtgtcagttctgctctatgagctgattttttttttctctgactacctgagaattgaggcagcagggccaagggggccgacttgccacgtgaggttttgtctttcccaccttgttaggctkcttctttgcctttctgcctggcaattcctgaaggtggtgttctgttttatctcttttttgtttttaaagtgtttgtgcaaagcatattattctgtttttactttgcttcttaattgagtatcggccatgtaacttattgtttgaagcagttacagcatcagggaatagtcccaaatggcacgatgagcctgatttttcctgatggctgtcactgtggaaagggacacccatgaggtmggtccaagccaaagaaaggagatgtataagtacagcctaatcttattagtgggtctagaaaaactgcttctttattaactgtcagtcttttaaatctttgctaattataacgattaaacatgatattttgtagtcatttctacttgcattcttgattattagtagttttgagcttttttacatatctctgtaggattttcttcccatgtttggaatttctgtttgtgtcctttggttatttttcttttagactattctgttttgttattgatttataagaccttttttctatcctattgaaattaatcattttcattgtggttaaattttaycattttaacatattttgagtgtgcactttagtggcattaagtacattcacaccatttgccaccctcaccgttgtcccatctccagaaatttcccgttatcccaaactgaaaaaaaccatggtaggtgctatgaaaataggcccaagggcctcttcgattcttaacaagagagatgctaaccccttttttcccacaacactagtaacacttcttgaatcatctaatcccctaattatttctctggatccagtgctgccatgatgattgcaacttcattttaaagatgtattcatacattaaataaacaggcaaacagctgttctcatatgaccatcttattgagcaaattctgttttgtttagtctttatagttcttccacttgttatttaatctactggtgtttgatgttttccttgcttgccaatgtggtatttccagctgtgcatggaaattaattttctatttgaatagacaattccaggaaattatctattaaggttataggaggcaaagagaatgttgctttatagttttgtgtgtgtgtgtgtgtgtgtgtggtgttcttggcattataaggaggaaaggttggtttaagagttcatgattgccagtttttgtttttaactaatattacttaaataaaacaaactctgccactggtcacaaacgctgtcaataataggaagtatggggaactgaaaacttattctctatctgaaacaacaattctaaatggattgctcatggactctgaaaccttttttggacaatagacctctttgtgtatctgacagattctgtggaacctcaaaacctaaggttcccatayttttatctaaaaccctagttgagatgcattttggagtcaagaatttatcagattttaaaaaggtagtatgatttaaaaaatgtattgggttttcaaaagtaccatatacccccatattacctatcacctttaatggggtctgggatggttccctataatcaaaaaatagtatttctgcagttaaattcatagatcttaatcttaaatgagataaataaaaacatgaaatagcctcacatctgtgtaggtcagtttatgctgccagataagttgaggtttgttgccaaacaatttctgaaaaatcttttgttctttaggatcagtgataagggacaaacacaatttcacctatactctagggggttccactgttcttggtcaggagtgttttggctccatgcttcagccgggcctgcttctcctcagccctactcaagtcatggacttagcattttcactgttacagacatttttgcttctggagttctgcacctgtcacttttttgatgaatttaatcctcttttttgcagccatatygtatatgggctctcattctttatactcaatatgtttgccgttatgtataaatgtttcatcataacgtgaacacatatattatgttcatcatcatccctattcctttgtattggttaaaaaattggttattctcaatacttgaaatgccttttttctgtcttcctcctgttaatttatcctctaccccatcattgtaccaggataaccgattttctccttcttttatattctctatattcttttaaagctttgtgtctaccactgttttagcatgcattacattcctccataattatttgaatatttatccatctcttatataagactgcacatttcttgagagtaatacctctttatatatccattgccttgcacagtgcctggcacatacagattcaaagcttttcagcccaagataaatagaaggtgtacatttggagccagtggggtaagattggagacatgagaaagagggatgtacaatcttaataaattagagttcaagacagaatagtgtagaggaacagtgattttgtttagtttatgtgcacatgaggattaggaaattaaatgatatatatggtttggagaatggagaaatttcaaaaaggaggtaaagcttcagacaaacctgggcaaatggatgagattgggatggaayaggcaaagaagaatgtacagtgctttcagagaagggagtatgttgaggagcgaattggcattggtggctgaacaagatatttaagctattgccaaactataatggaagttctgaattatgagatgatggaagaaaaaggtcagtaggccaaatggtgctggattatgtaaagcaatatataataagaaaaagaattcgatctattcagagtaaggtgtcattataagttaaggagtagaacagggatggtaagataaaaaacatttctgaaaataaatgtgtccacagcgtacgcagtgatgcctgaactaaaaagggtgtaggggtgtggggctgagttgttttacatcataaggacctgaaccgagaagacagtaatgagactggagaaaagggtgtgaaacttttgaaaagtaaaaccatagtgtgatagttaatttcttgtgtcaastggagtgggctacaggttgcccagatacttggtcaaacactacttagggtgatactgtgagggtgattttagatgaggctgacatttaaatcagtagactgagtagagcagattgccccctttaatggggatgggcctcatgcaattggttgaaggcctgagtagagcaaaaggctgacccccyttatgtaagagagaattctcttgcctgacagtctttaaactgggacattgaccattactggttctgcagtagccttctggcttctgactcaaaactgggaaatcagctctgcagcttttggacttgccagaccccttaatcatgtgagccaattccttataatcagtctccctttctttctctctttctctggagaaccctgactaatacgcrtagtatatggagactgactagatatgggagccacaggagttgagaaaggaattaacaattacttaggaatgggaatggagaaattgaaaagggcagtcaattttgatggaaaatatatttggttttgattttgttgactctgaagtgatattggagattcaagttaaattactgtaagcagctgtagtgaggtaggtagcttgtgtgggtgaggctggatgttgcatctttgaatcatctacaagtagggcaaaagaagttacstgacagaacagmgttcacaggtgaatgagagagacaagcataggcaaggatttgactgaggttcttcaggtgggaattatggggctagaggagaaagatgagccagtgtataaaaatattggtggcagagctctcttgacattggtttgtcagcctcttgcaccagaatgtaagctccatgaggccaacaatttactcagtcctttttccctagctttaagtgttgtacttcagatatttgagatttgtagacattgttttttcttcattttccacttgagacaaagccttttaaggaaaactgaaccaggaattaggatttatttgctgtaatcttgactttgcacttagatatagagactgaggtttgactttttaattcctaggattttgactcctttttcaaaaaatgaggagattggattaagaatttgtaggattccttacaactcaaaagttatggagaaaaatatctataggctgaaaattgttctaagctgcaaaaatggccttgagtaacttcagaaaataaacattaaagcaaatcatcttttatatcccttttttgaatgttttatttatttaatatcaatcaaaatactgtaatagattaaataaatcaaaacacatataatcttgtctagaagcagctttggactaaaaattttcttcgcaaaatattaaaggtgtgacttttaaagaaaatctcttaatacaggacctaaccccattttatatagcattaagttaatataactgtaaaaaagaaaaaaatataagcagcatttttcttttaatatcaacaccatagagaaattttggttcttatggaaattttattctattacaaatcttccaactstaaaatcttctcttagagttgattatgtaattgaaaacaaagggaagaatcagtggctcaaatggtcctgtgtttaccatacttcattcaaaattctcttgcatctcctcatatgtttctagatatgttaacatcatacaatctcacaatatccatttttaatttatgcaagaatactttctgttttgaatagcacattattctaggttatatccaatgtcagttttgggtatttgatcaatatgtgatggttaaattatagatggctaactttttttcctaattgtacaatttgaaatatggtgaatttccaaaaaatagtttggagaaaatatgaactctattttaaaaatgtgcatgtatgttgatatcatgtatttgacatagaaactgtcaaacagaaatagatgtcataaactttaattcaaaggcattagactactagcactaacaaccaacattttttttttatcaaatagaacttattttgcccccaggatcatgcgttgttttagatattaattaacattataattgtcttctcactttctggtatgcaggggtactctccatgaccaatctttgtcatttatcacctayagtgtaaaatttccatcaggaaacaatcttctgccttgaactaccaaagtgctgattttgctttttgtcattaagttttttgtttgtttgtttgtttgttttaatttgctttagagcttctttattgaggacaactaacagttaagagttttcttggggaatagtgtcacagcaagaatcacacatagacttttcagatacaattcttctatctmcaaagtaatgctagaaatattgttgatttacaatagatataatttaaaattatttatttttattttccacagatcccaatttctggatttcttgtgaagtttaataatttatccttggattcattttatttttgtttatatttatatagaaggcatttagccattcatgttgatcagctgacctcttagttccatttgtataatgtaatatctggttatataaacccaaggatctgctgttattgtttgctctgcaatctgatagataagagattaaaatagggtgggtgtagtggctcatgcctgtaatcctaatgctttggtaggccaaggcagaaggattgtttgaggccaggagtttgcgaccagcctgggcaacatagtgcgacctgtctttacaagacataaaaaaattagttgggcgtggtggcatgctgaagtcccaacactctgggaggctgaggcaggagggctgcttgaggtcatggtttcaagaccagcctggacaacatagtgaagtcatgtgtctaccaaaaaaaaaaaaaaaaaaaaaaaaaggctgtgcttagtgttgcacatctgtagtcctaccacgcaggaggctgagatgggagcgaggattgctggagcccaggaatttgaggctgcagtgagctatgatcacaccactgccctccagcttgggggacagagtaagaccttgtctctgaaacaaaaaacagagagagaaaaaaaataataagatgtatgtattcagaaacataaaaaagcaagagtaaaasttttgtgacaactttgttccatttataagtcacactaatgactgatttgcttcttagtaattttccatttgtaacattttgtacctggatacacaaatgtaatgcaattgaacaagaaaacaattatctgtctgctggaaataatgtacttatctcattgaaacaattgacttgtttaaaaatacacaggtctgttcagactgcagttacctgtaatttgtaatgaatttccaggaagaattaaaatcctctgatgtaattgaatcagtagttgaaaacactgattgtgaatgataaatttccatgcataattcccctcttatataaacctccatttggagccattttagatttgagaggttttttcaatattctatgagttttggctggatccctggaaaacttcactcaaaggytgtatcttccagtgaaagcttcatgttgacttgtgggttctgtgtcagtggaaygtttcagtactttttggcctggctcaaatgtttcttggcattttctgtggagtwtggcccaaccaatctatagtatcacattggactccagataaaccctaaaagccgtaattcatccgcaagctaatatgggactttattggggtttggtagtagactaacaccatcgagcaattgggagttcaacattatgaatgatatttctaaggacatatctatctgaaaaatcatacaaagagaagctacttttcctttagcccagcacttatttttctcagaggtctctttcacagaggtcaatgtcctattttaattcgttattataattttttccctcctcagcagtttctaaacctattgcagatcaacagctttttcttctttcttaaagtgagatggctctggctcttggctgacttcagtcttgtgatgtgggactgatgtgcgttttcatttttcactttgaaggtgctgccaaagctagttaattttagttataccatcatagaatgctggagcctgtaggtgccctagaaatggtttgstacagcctcctcgttttacacataaggggagccaggcccagttccttagttctcacaggaagctacggcactgttaggatggaactcgtgtccgcctcgcaacagaacgggtctctgcaagtctrtccggctgctgaaagatccactccccattcccagtctcagattttgtacctctgggtagttttcctcttttccttaaagctttttaaatgtagctccccatatgttatattaatttgggaaaccagccaacaaattagttttacatttgttaggattctagggtgttatttatgataccattctctttgtgttctgagtcactaagaaataaatataggaacaagacagagatcaaaataatagcttcattataaacagtgttaaattttagaacacatagtggacccaaggtggaagccagcttcttatgcctttaacagtcccctactgagcttagccactcagtcatagagaagtgtgcaactgcaggttcctggtccagccctcatctgcagggcccaccctcagggaggactagctgagcagcacctctgagagactccaggaaccaagggcctcctgccaagggaagggcctctttctcaagtctggccaagtagagcagtccatacccactcatggaaagcagtgtccttcaatggctcaccttctggtgagtgtttctctttccttcttttctcttgctttagcattcctgtttcacactggtattctgaaaccaatattagtatatttcttttccttgtaagatgagttattttcccattattctcctgaatagagttgaaaaagcaaaggtagcaaaatcagcctaggcaactgattatttacaatagagaaaaataaatgaagaattaagtagccggtaatgagagatggcaccatgggaacgtgctcagaatacttcccagtaatggaagatgaataatttttcctgttctctcctgaccaggccattgttctcacatttttaagaagagaaagttgggaaagacttttacctctctgtttacatctttgtttaagctctagacctctgccagcacccaccattgtattttgataaatatattctcagccatctataggtggattcacatgatcttgttttgctttcattttcctgtgattttgaattaagtaaaatttcagatcacagaactctcttggaaattttagttgattcatgtaggtaggtttctataggtttcactatttcattttgttccagatatttttccaatgtttatctctttttttaaatcttctacattagctttcaagatacttacttatgagagcccagataatatttaagttttcttcatattaagggatttttttttccttcagatttcttgccttgtggtgcatgttgcacagacacttgtacttaattcagaggtaaatgaaaagtaatttacaattctaatactcttgatactcatactttctcctttactgtttttatgcttgcaggtttcacttccttttagtaggttgagggccatttagataaaaaagatacagaattgcagactagtagatttaagagtttatgtattatgatttaagttgttaagatttaaggtgttccagtagcatacttggagttgaaatcatgattattaagatgaattctttttgcgtgagcagcttaacagacttctcttgaatcaccataatgtttttgcttcatgggcatgtcaagtatctgttatagtggaacctgagagaggtcatacaggaaatagcatagaagttgtcacagtacacctggaatgatgctcaagtggttgccatgggctcaggagccatttgcctgggttgaaactcagctcttcattcctttgtttcagtttgctcatctgcacaatgggcatactaattaagatatctacctcgaaagttcttgtgaggattaaatggatgaatatatgtaaagcagtttaaacgagtgtctgaacattatatatgctttataaatgtgagctgttaaaacagtccccacgtgcctaattgggtgaatagatcagggttcctctgtgttttcaagtgtttctctcagtacactattatttaggaaaaatagactaaaaagatattgtctgaggtgttactggctgatattttaaaaggtgaaccatgcattaaaagattgtgagtctaaattttgtgtaatttaatattaataaataacctgacttctttgatggtctacgtgaaatatgaggatttcaggcactttgtttccacagccaaaccgtgtatgttgtcttcattactggcaccgattttggcattttgatttttaaattattttgtgcagttttcacagttgctcccattagaggggaagtattgaggaagtagtcttccagttattgacagatcttaagaagcataaaatggtttggtattttggagaaatgtaggataatataagacccagaggcatactattccaagtagaaaatttcatcatataatgcatttatatgtatgtggtatatgtgggtaggcaaattccatcatgaaaggaataatgaaggaacagttttggggcaacytaaagttttactttagtttgtataataattaactcagctgcataaatgccaggaaaataattagaacaacagattatgttgaatgcctaaaaaaatgtgtttaacaacttttaattttctttcctcccacacaccacttcctagttkgtttctggcacaccagttgtgtctcaacacagcggctgatctggtagagttgtgtgaacacctgtgattgtggcagaacaaattttctccttytggttacatttawcgaaagtaaaagtagaaggagcactgtattttggaggtaatgtagagatataggggatagcctaccttttctccaaagctatgtatgagctttcaatgttttgaaagctcatgcatactgaagcgtgtgtccacatggtgaatgtaaacaaacaaaagctgattgtaaccatcttgcttttcctagttagatatcaatgggctactattggtcagagaaacaaagagggacctccattagtggggaaaggtaaaaaaaatttagtgacagtgaaagttttaaaaataatatatattttttctgtttaagatattccattatatttatgacgttatgagattccttcaggagtggttgtttgataatctgtagtttacttaatcattcctatggtgttacagacagatttataaagttttgctattacaaattatggcaccacaaatacctatttgaatctgccttttttttttttttttttggaattatttactcagtttaaaatttctggcctgatgttattaggttaaaggctttgcatatctttrtaagtcaaaggatgtagattttaacaaatggcttttcaagtgctttgccaaattgctttctaatataaatatataaattgttaacaataatgtatgggtttttcagtttcactttttgagaccctgaacagtgatcgttgttgcttttttaaaataattttttgtatttattcaataaatataaagtggaacttcagtgttgtttcagtttgcattgctttggtaaataaaatgcgtgtgtgttctttttttcttcatgtgtctttaataatttaatttcctgttgtgcatgttcatgtttttgaggtatttttcttcttgattttctgtttttctgtcagattgtttatcccctgtatgtaacatacaaatcaacattttatcttatgtttgataaacatatttctgcaatatgttgtttttttattttaccatgactattacttttcttagtgttaaagctcaaactgttgtaaaagttayattattttgtttcttttattgactctaggtttaaaaagttgtcatctttcaaaaaaatattcaattctattttatgctaatgtttagtgaactaatttatatgtgtgtgtgtgtrtttataaacccacggatacatatatgcacaaatacacatagggagttagagacattagtattataatgatagtatatggcatacattttgatccatttttttcctcaaattactagccagttatgtcagcctcattgattacatagctttctgtcttctcctccccagttgttttaaatttcccctttatcatattattacattctaacatataattagatattttactgggctttatttttttattcactgatctatttcaaattagatataaaaatatttttaaaatttaattcttcaaattattaatgcttgataatatgctttaaatgtagtaggttcaggtcttcttttccaaaaacattgagcttctcctgtgttacaaactgtgaatatggaaattaaaattatacggtttccccactcatagtaatcaaagtcttgctggaaaaacagacatgtaaaaatgtaattatactataatgctacaaatccagaatggagagatgaacaaagcactgatagcaccgaggtgacagtatatttttacctttttcccctatattttctagttctaatgaaagtttgattatsatctaaattgctaatttattatatctacaaaataacttagaaaaatttgattttttaaaatcctataatcttctccctcagggttattgtctgtttcatctttttaattttctaattaaattctgtagttttccttaatgttaaatactggttagaaacatttcatgttaaacatacgcatcttatggatattatttgtgacagtctacargtaattcagtgtttgatttatttctttaaagaagcctatattttgggtttaccattcacagggaaaatcggagcccatacttttttatctttctttattgagtgtggggtctcaaacattcattggtaatacctttgggatttggtaagaaatactgcacacagatacaatgtagaaatttcattgagatttttttaatagtaacttttaatagttaaaattttgaatagttgcttttgaaatgaatgataggccaatgaaaaatttgtgtgccatgaaagctatatttttatgaaaacctgattggaattatggaaaacaatctgtgttttatagtcatggaaacctgtgactgatgatcatttttggaatgttaattgtaatttctatcattgcagctgttaattggtaacaaggaggggattaaaggcattaaggagttttggaaaataaaacttaaacacacatcaaatagcaatcatttctggaattctgctcatattagttgtataaacctgactattaaaatatagaataaagtttatttcattattccagtttctaaactgtatattatttaaaaatatgtttgtatttacaaattaggtcaggagtaagcagggcctcagtgacgtaaataaatcccaatggaggcttgtctttggactttctcttttgtgtaattctttgtatatacaagatccttggccaagatcccattatacaaaagaaaaggtggggatgtgggggagggtgaatattcccagagaaattcagcctttcaattacttgattattcttgtggttgcaggaaattaaagaataataagtttgtttcctatgtgaatcataaaaaaataataagggtacacacagggccattgacttaaataaatggatggaccttaaaaaattcactttttggaggggtgcatcatgctttttgaggacacactgaaattttgttggtaatcccagttccaagcctttcaagttagtttaagtgtasgaagaggagtggcagcaactggataataaatttagtacaaatgtttattttatttcatttatgtattgcctcattcaaaaaatgattcgagatatcttttctttttttttttttttgtcttttgaggcaggttctcacttggttgcccaggctggagtgcaatggtgccatattggctcacagcaacccctgcctcctaggttcaagtgattctccagccccagcctcccaagtagcttgggaattgtttttgtttgtttgtttggtttgtttttgtttttgtttttgtttgagatgagtttttgccatgttgcccagggtggtctcgaactcctgaactcaaagcaatctgcctgccttggcctcccagtgtgctgggattacaggcatgagccactgcaactggccctgatttgaaatatcttataagaacatgttcaacttaataataataaaatgtgtatagaagaaaaggtgcattatctggaaaagtataaataagaagaaagtcctaactggaaacaagaaaataaatattttaggatccatgcaattttgttttgattcattatttttatttatttatttttaataaagataggttctcactctatcatccaggatggagtgtagtggtgcaatcgtagctcacagcagccttgaactcctgggctcaagctgtcctctcacctcatctgcccaaggagtctttttttttttttttttttttttttttgatttgagctttctagcagccaaaacaaaaagagtgctgtggcataaaaggatagatatagatgccatgtcttttgccacacacgtgtgcatgcatacacacacacacacttacatactgtctctcataattatttatttattattagatttatttatttattcatttatttttgagaaggagttttgctcttgttgcccaggctggagtgcaatggcgcgatctcggctcaccacaacctcygcctcccgggttcaagcaattctcctgtctcagccttctgagtagctggggttacaggcatgagccaccacgcccggctaattttgtatttttggtagagatggggtttctccatgttggtcaggctggtcttgaactcccgatctcaggtgatctgcctgcctcggcctccgaaagtgctgggattacaggtgtgagccactgtgctcggcctatttatgttatttttaaaaagcaaattgctttcatgttccttaggagtggcacagctatgtggatctctaatttctaaaataaatttctcatacgtatgcttagtagtactttcgtttcaaagaactagcttacctgtgggtgatttcagaccaacctgttcagttcttctgtttgagagacaaattcaaatgcttatagttacccagatgaccacctttcacattttctatctcatcctagctaccacttctcccttaacatcacctgcaacaaacaaaatgactcccctaatctgaagccaattttaatttatgggatggacctagtcatttgtatccaaaatgtctgagagtatctttttttttttttttttttgagacagggtctctctttgtcatccaggctggagtacagtggcatgaacaaggctcaggcagcctccaactaactcctgggctcaagtgattctactacctcaggctccttagtagctaggactacaggttcgcaccaccacacctgactaatttttatattttttgtagagactggctttcgccatgttggccaggctggtctccaactcttggactcaagcaatccacctgcctctgcctccaaaagtgttgtgattacaggcctgagccactgcacccggcctgtaatatattttaaattgtawacaaagttatcattgataagatatagaaaaaaatttwaaaaaaaattttatctagctgtcaatgagaaggaaagcaagctaaataatgaaaattaaattagcatgaggaaaatgaaaaataaagagagactggaagataccacataattatgtggctcataagtctaagagttttgaaataataattgagtcaggaaaagacttctgccttactcatatgtgcattttttgcatttaatattttattatatacaacttaattgtcccttagttaagtcctaatccactgaataaacaaaagtaattagtcaacataccttgcttagcagctttacctttttcaaattttattttgtttatttattatgtcatttccaaattcctgtgggccttttggtctgtaatctccataaaccactgtaggcatagacattttaatggaaagggctagtgacttttctggttttgtgaccttttacattctgattcaacaaaactttattggtcacccgcttatataacagtcactatgccaagagatttttcataccttatcacatattactttccataataaacccatgaggtaaatactttatggtccccatttaatataggacactgctaataagcctcagggagaaatgagcccagatcacattgctagtaagtgctaaattttggctcaaacccatcttgacgcttgaagccagtgttctttctatagccatatctcttgctaagtacttctgacttttacttaagatatagtcttctctttgattattaattactctggtgtgaactgtgatcttttatgaaatctaagactgctactattatccgggcaaaattgtggaattgaatcattgagatgctgattgaattgttgttgatggttcaacaattttgagatgagacagatcaaattttcctttattgaaatcagagtggttggagcttaataaaaaagcagaacatcttaaggtaaaagagcaggtacttttttctttttttttttgagacagagtctcactctgttgcccaggctggagtgcagtggtgtgatcttggctcactgtaagctccgcctcccagtttcacgccattctcctccctcagccttcagagtagctgggactacgggcgcccgccaccacgcctggctaattttttgtatttttagtagagatggggtttcaccatgttagccaggatggtctcgatctcctgacctcgtgatccgccctccttggcttcccaaagtgttgggattacaggcgtgagccaccgcgcccsgccaagagaaggtacttttttttttttttaacactgacattagttctctttttgactgctaaggataactacaaatgatacattctgtaaaccttttgtctgaaataataaagaaagtgaagcacagtaggaattctttaaaatgttgtcttgttcattgggcatttattgggtacctagtataatccagatattctgtggtgttctgtgatacaaccttaaataagacaagacatagatctggctctcaaaatatttatagtctaagggggaaactttgaatttataattagattgttaattttcaaaaattaaaattcaataagttgcttattagcgtcatcggctttggaaatttaacacttttctaatgaagaacataagttccagttaagagggtttcctatttcagacaatgtagaataaatcagcttgttccataacttttaatatttttcaaatataactcgcattttacctttagaactaaagatatgtcgagaagagttcattataatgtaattgagtcacttaccaagcctattttaaaaccagttacttccttttcttactttgcactctgtgacacatagacttccagaatcagagaagtattgtttttgtttttaggcacttgctatattatgtggaaccaaagccaagttaatatggctaagtaattttcagttcaaggtaggatattagatagaaattctcttttctacttctagatttggacatgaagtagcttttcatgttataaaatgacaaattttatttatttgtaatgaaataatcccttttatttatagccaagttcatcattttaacacttaatcttccatgacagtccggaggagaagaaacttggcaaccattcattattatctgtttttatcatcagaaggtatttatttgtagggggagtgtagaaatgatgtcaagggtaggacatttttgtacaggacggcctttcctttggagtcatgatggtaaatatgaccacagttacttaaaatgcatgcaaatagttaccagtcaagatgtataaagttccctggaaactcagaagcatgtgattatagctgtggaatgagaatgcctaataataaaaggagaaaatgtcagttttggattagtgatttaggaatcccatcagtgactatctaatcagcagcatttcacccgttgttttacaaagctcttattgagctgtgcttccatacctttgggcttgtatgaagatctgctcatcatagaagcccacttacctatagtttcaacatgacaaatctgagcttaaacacaaattagaatatttaggccctgaggctatttcttggatttaaatatagcacatagtaggtgaactttgagcttgataatgctgtggtacagtgagagaaggccagtgtcaaggatatctgaattgatttgaccttttgtccttgcatgtgaaaatgacgtgcttctgtagaagtctatatactcatgacttccttctaaaatgattattgtacagtattctatggacatttgatttgattcktctcacaaaattatcgagacatccactagtgtctacttaattgatggcaaacaagaagaaaactgtaatctggagataactaggtaaaccacatattctacatctgtgcctggatagaatgacttttgtggttatgtatgcagcaaacacttttgagtgctggtcatttccctaagctctgagaatgcaaaagtgtgccgtgtccatygtgattattgtggtgaatacagagtgttgtgagagtaaataatgtggagggagtgagaaaagcctcctgtgaggacatttagctgagaaggaagggtaaggaggagacttaagagggcgtcagaagttctggagggaaggggagagtgggagtttgagggacaaatggccgtcatggtggagtgaacgaaggggaaagtcacctgggattaaggataaagagaattcttgagtaactaaaaaattgatttgttcacgttgctcagtgattctctgactgtgtttctttggggagaggcttataaaaattagaatgtccaagtcttcatagctatctaaatgttttctgcatgtttctgtccagcacctatgtctgacttcatcccaatttgatgattaggatgatgataaacaggatgatgaataatacaactatggagatttaaattagaagaaaaaatcttctttatctttttttattgtaagatttattaatacaaatctgtrttgttattcagttctagaatgttctaatatgcttcttccatccaaagttatgattacttctttacctcatataatattattacattttcttacaataaaatacatttttaaaattcactattaaccctgtctgtgatgagacagcataatcttgtggttaatattagctcaggctctgtagccagaaaatacgggtgtgaattcttgttgcgtcatcaaagatacagatgtgagtcctggctgtatcattcactgactgtttacatttaatatgttatttagccttcaaaacctttgtttactcatctgtaaaatgggataataattgtaccagcctcctaggataggtaagatgttgcagtgaagtttcttgttacgatgtatttccttgattatttcataagacagaggaggcatcttttctgtgttcctcccttgagatactaaaatggccagggagcaggtaagttccaaagattaggtttcagactgtcatatacaacttgtagtccatctgtgcagctggagactaaaccaaagtgtcacataaaccttttcctaatcaaagtggttgttcatttattaatgtaaatgccctgtgccttggatgtgtgagtcctaaaaatacacttccagggataaaaatagatttctgggagttctgagatgctgcttaatcagaaccagctgcaagctgtctagaaaacgcaagttatatgagccagatggcttttgccctttttgctttagacagcatgtaatttggataactacagctacagtaatacattttgccagtcacagtgtttgataaacatgtttgttgagaacagccacttccaattagagacccagtaaaatgttaatttattttaataaattttccctctagggcaagacaaagaatacttttgacaggttacagaaatatctgttcatggaacagagtactgttcaaaagttattgtatgccagtgattaatttttcaatttggcatttagagaatgatgagcagtattcatgacctccccctccatttttctccttacaacctcatgtatatataagagaccaggatttttcatatttgaaattatgttgctttacrtgtagaaagatggtttagctaatttttaactttcttctacccatgtctaattactataaactctgatamtagttactgaattattgcttgcttacagatgcttattaatgtggtagttcttgggatttttcttttatgatcgtattctttgagaagaaattttctctgttagtcttatgtagccatgactgattttcatcagctgaggactgcaaacgtagtcactgatattggctgaattctaattttattcagctcctattcagacaaaatagtaaagctaaatgtgtaagctattcacactgtaagacctaaactcagatacagcctacttttaggagatgtgaaactatcaattcttccattttcactggtggcaccacttcwtggaaaagcgtatttaagccctggtttcccattacaggaattgaaatattctgtgctttatttcttgagacatgtctaccaggcatcatgtaacagactgtgaagtacctttgaaggatctcttgagtcataatttttccataattccagtccttccagctttgtaagtttagtaatcacccagcagttgtttttttccttccccagtttaagaggagagggtatttcatttccaggataagtgatattagaacataaacatcattataatagtagctacaggtttatttactcttaccaggaactatgctaatcactttatacattattgcatttaagcctcactacaacatagtattataaggtatatatttttattctgttttgcagataaggatgtcactattaatataacatttttatattaatagagtataattsttctagaattatcactagaatgatgattattcaacatcatacagaaagtattacagccagaatttgaagctactcttgtattaatggtgtgtctggctcaggatctttaattccacccattaagctatgaaaattggcatttgacctaactagggctgctttttcagaggtaaatgcatgcctctggccatcttcatatacttcaaggaatttacagtattgcttcttagcatttattttaagctcagattgtatgtgaaagagtctgatctctctcatcccaccttgttagatgaattataactgatgtgctttaaaaataattcatactgctggggaaaaaatctcactttgatgcttttccagtatatagttaagaattacactgrtgggtagtaattgaagaaattggtaagcacttgtgtgatatgaaacagcataggaaacttatatataatatatgatagccattatatataagcttatatataatgtgtataacatttacaaaagcaaaataatacctttatgtttttatttaacaaagtgagataaattcattagtgaatgcagcagggcatacctgcaaattctgtcataggtagcaggaaataaagcaaagcattktttataaaaagacctctttgttatggttctgtccactcaaagcaaactgatgggggcatggaaaagatcttattacttttgactattttggaagagcatactgttggtattattttcatttgcagctataaaatggtacttcttgaaagataccataaaataatagaacagtttatacttaagtacwrtggtatgataatgggcttatgctgtttgttagcaaagagttgrtgttatttgttgtttcttggaaatgaaagggagaaacagataatattcctttctaataaatggattattctattctaccctattctattrgacaattttatatccaaacaattactgaactctatttttcatatttcacagagttgtacgcaagatctrgatttgaatatgaaatctgatacctccgtgggccagtcgaaaaaagcattttgatatcattagatgagagacattatagacatattagttctagagaaagtcccggtcctttctttatgtcaagagatttgtgttagaaagagccaacaaggcctatgcactcaattaatatacatcagttttctgttagcatgtaaggtcctatagttggtgttcaagaaaagaacatgatacatgaaaagtgatctttgccaaatgtatccatgtttatgctaatgtgggtaaattgttcctcttttaccatgtgaaggattggtagcttaatagtttgctttgcttaaatgattttatgtggcagtgttgaggatctgcagaagtgactgtgtccttgccctcaaagaacttttggcatttggcaccaaaagggggcactgctctcttgtgacataaaatgtagtccccgaatagtggggcttttgaaggttagtgactccaaaggaaatagtagatgaaaggaaaacgtatttacttcatctcatgggggtctttcttgccttggtcttcctgaagaaaagataagcattgggctgaaaatgtttgttatatacccttgggcaccattggcatattccaagctgtttttgtcaatcatataaatacatatttagacaatttctgaaacatttctcataaagaaagaagtcattcatctggtatatcatattcatatgcatgatggctttctagagttgtgtcatttcttcactatggcttctctcgtctcgcacctcttcagaaggcacccttcctttcttttttcagtaaataccacaattttatttttaggtgtatgcagcatgaaatgtatgtgtgtatgtgtgtgcctgcgtgtctgtgtgtgtgtgtgtgtgtgwgwgagagagagagagagagacagagagagtttgagagatagaacagagagattgattaattggttgattgattagttggttagttggagcttttcccagaaagttttccaactgttcttattggcatatttgaaagtttaacaaaatctcattaaagttcatggatttcactgaaatctcttatttttattagataatcagtaatattataagtatacataatctgccatcccaatattttcaaattttagttctttttctatcgtattggtaagaatgttacagtttcttcctaatgttggtgataggcatctgtacatctggttttgttggaaacaactctgctaaatgtttaataaggtgctcattgtaagttaaagatagggaatctttattatattatagaactaccctggcctatgcacatgtattgagatgactgcatgttatttagcatgcagggataggttctgttttaacatattttgacctattgatgtcgtaacttcattagtagattacctagtattaaaccattctgggatttctgatgtaaacacaattggacatgttttattattatttaatatgctgttgggtttggaatgtatttcatctagcatttttgcctctatatttgtgatactgaatgatagttttctgttttgtcagctggttttcaggttttagtgtcagggttactaggcccatcacttatgattatacaagttgtacactgccacctataatattgtcatttgcatagttattatgacagttttacaaaggaggacagtaaagtatcttgaggaagggacttttttttaaaaccgtattgacttaccatatcaactagcagaatgtaacattctaaaacagatttttaaaaaattccatatttttccattccttcaatgtttaaaagaatccacgcaaaaaatcagtcaggtttatttgacaatagttgtttacttaaatttcttctagaactgttcatctctttagggtttatatattctactcagctgggatgatcttttaattttattgaactattaaaattcattctttaacaaccaactatacataatattctttataattcttttattcttttctgtgtttttcatcccccttttgttactttactattttatctttttcttgaatattaagatttgccttttgttttcctcttttttccttctccaaatacttttggctttatttactggaatgtaatattttagtatttgaaattaacaactgtttttatctttattattttttcctcttgctttccttagatatagtttgttcacttttttaaaaggtatttgcattgaatatttagctttcttattttctcttattttttattttcaaaggacctttttgggtacttttaaagtttgctaatttactgtaactggaacatttaatatggagttgaaccaactaacataggtgtgctatccatgtgagaatccttcggaaacatttagcttgacaaattgaaacactggaattaatcttaaaaatctgtattaggattgcattgacaatgtctagtgttttaaaatggcagtttattctctgattttaaaagcagtacaagttatccgtggatatttggaaaatatagagaaacatgcttagctatgtaacaattaccctaaaatttaacaacttaaaatgacaaacattaattttctcacacagtttctgagggtcagaaatctgggagaggtttaactgggccatttttgctgtgtctctcctaaagtagtagtcaggctgtgggctggagctgctgttatctgaaggcttgaatggggctggaggacccatttcaaaaatgattcactcacatggctattgactggaggccttagttcctcactggctattggcaaaagatgttggtttttttgccatgtgggccacttcttgctgcagagtgagtgatccaagayagagtaaagtggaagctacaatgtcttttatgaactactttcagaagttacatactggctgggtgcagtgacttgtgcctataattctagcagtttgggaggctgaggtgggcggatcacttgaggccaggagtttgaggccagcctggccaacttggtaaaactccgtctctactaaaaatacaaaaattagccaggcatggtggtacacgcctgtaatcccagttactcagaaggctgaggcataagaaccacttgaacctgggagatggagattgtagtgagctgagatcacatcactgcactcyagcctgggagacagggagagactctgtctcaaaataaataaataaataaataaatttaaaaagaagtgacatactgttccttctactgtattccattgaccctactaaccaaccgttatacagtgtgggggataatgacacaagggagtaaatgccagaaggtgcggatcattgggccatcttgaaagctatccaccacacacagaaggacatagaagttacgcttaggtccacyattcagtccctgtggatcttccaggtttttgttttcccttccattgcagcagaccataaacatttcttatattatgaaatagtgttctaaaatgagatttttatatgtttgcttagtatccatttttagggcatgccaatttattttaccagtttcttaacattattttataattgggttgttttgagcatttgactattataaattataatatttcttgtctrcaaatccttgagcacatctcctgccatttacctaaaatagattcctagaaatgttactcctgggtcaaggcrtgtaaacattttaaggctttttacacataatgtcaaaatattctgcagaaatttgtacccaaatttatactagtattgccataacaaaatgatgcctaacttcttatgtgcttttcaatactaggtacaatattttaaaaatataaagagcctgataaggaatatagtatctcatggcagtttgaattttttattactaataaggtaggggaattattttaagagtcttattcttgaatctatgtagtatttttcttcttgatttttaaaggtatctttatcataattacttttaaagttgtaattagttctctttaaaaaaattatagtttgctttctttcaaaatttatttcactggatgttttcattaaggctatacaatgggagtggttctgtaatgaacctggaagtgttgaaaaataattgaataacttaagcactttcaaaataccaattagtttgttggtgactaaactaagtttctctaacttacattttattgattgaacatttgctagaataatgagttaaaaagtgagaagatgcttttttttttacttttgttgtaagccatctgccaaaatttggtgagtgctgaggaacatttgtcaaggaataaaatcataattgagagttgtctagtctgaaaaaataataaaaacactctcagtgtttccatgtgatagaatgagaatgactgttattacttcgaaagtttcctgcccaggactttcatataactgatgttctctgtgttgtacaaaaaagaaaataaataatagcttgctgaacagttttctggatttccaaaaaactttattttggtttttgatattttcataataattggttttaaatttgaaagttgttaagtaagtttaacagtgagagtggatagaatatgttgtctggcaaggcaggagcagagtgtagcagggagaccttggaataaggcgcttattttatagtcaactctgtttcctgccttgtggctttggtcctttcagcctgttttctcacctatacaaaaggaatacattttgccagatttgccagattattttcaaaactaagttatataatgtacacatagtgcctggcacacacaagtgcatgatacatgtataaagcaacaggaataactatggaaatgtgtactattcttaacataagtagttggaaggggagatcttcacaagaccataacaaaatgaaaaattcagtgatttgtaggtgaacattaaatttatgctataattctgaccaagagtgtatgtgatgggagggaggggaacaaatatttattttttgcaccagtgaagagttttgcaattatcgcattgctataaaagtttgctgaaagattaaaaatagaataatattagccatgactattcagaactgaagaccgtgccaaacaaagcaagcaatagactagcagtatgaactttgaaacccatagatgtgatgaattctgtggaaccagctcttaagtgtatagatacatagatgttcatgatttcactgggggaggctgatgatcataggtcttgaactggaattgaagaatgggttggtttgtacaagagtaagagagaaggagtgtcataagcccaggaatagtatggacacctacacagagacagataaccatgtagtgttttgctgtgaataaattgacctaacctagagaatctgtgtttgggatgcagtatggataggaatggtctgatcagaatactgagaaccttaattgtcaggcaaaagagatgaagcaaactgtagaccatcagttgaaaggttttagagactttaatgtagcagtgatgcagggtctctgtcgtagytcagatgtgggatgcactcttaaagtgagctcagtaagtcaggaagaaagcaatcagattccaaacactggaaccataatttctcacttatttcctactcaagaagcttttagtaatgttatcttgttctcttatgaatatgttgttttaaaaagaagaaattaaaatgtgacatagctgttgctttcctttggttgacctcacttttactttttattttaacactttatttttcaagaaaacacatactttgaaaaatcgtataattataattccacagtgacaatttctataatattttgcatttctattcctttttttttttttgtgacggagtttcactctttttgcccaggctggagtacagtggtgcaatctgggcttactgcaacctcctccgcctsccaggttcaagcgattctcctgcctcaacctccagagtagccgagattacaggggcccgccrccatgcctggctaattgtgtatttttagtagagatggggttttaccatgttgtccaggctggtctcraactcctgacctcaggtgatccgcccacctcagcctcgcaaagtgctgggattacaggcacgagcccarttgtattcctttcttggaggtgtttcctatgacttatcctggctacagacctgctggaaagggagtagcatttatgaaactcctacattgtattatgcatgttagtctcagcatcccatttagtctttacagtatccttataaagcagatgatgttattcctattttacagatgtgtacactgagcttccagaaaattagatgactggtaagtgttagttcagaatgctctgctttgtaacatgatgcttcctgagagaatctggggaatgcacaacttttggcaggagaaataaggactaaactaagaacagcaatgttaattttttttttatgccttagagatagggaagttagtctccctcagaggaatccaacttgattttttctgagggatataatatctagtcacagggctgttcctttgcttcctgaggaagtgaaattcaytaaattgggtagtgaccttccatatttaaagatacagttacagcttgctttagtaaaaatgttaacaaccttggaaaatgcaaaatatctgatctcaagaagattctgatacccttcattaatgaaaaaagaatgtcttgtttcctttctactataatgatcatgaattttccatgtcactctagttcctgaaagaagtgaattagtttgctagtagtgggtcaaaggtaactttctccttttaaaaactatgatgaaaggtgcgaggtttagatagtatggggaacttctgagtttctaaattataaaacacattttgaaatttgaattatgtgctgcttaatctggttcataattcttggtttcaaatactaatggaaatgttacttgcaagttaaaccctgaactgagaaacatgcttttctttattcttttataagtggcycttttaattgtagttcttttaaaaaggaagttaacacttaagtatctattaattcttgacaaggaccttattaaacctaagcaacgtgttttcaaaagggcaggtagctgttagctttatgtgagaaactaaaactaggaaagtaattattatgagcttcttaatcttttattttttccaaaatagaaatgtccctattttttcttattataaaaggaattgttaaatgtttaaaagtattgaaacagtactggwcagtatacattaaaaagtgaatgtttcccataatcttaccccctacagatgaccactgattacagtttaacacatgtttttccagaacttgttatttgcaaatgtawacctctattgctgtctacatatttaaaacattttaaatgggattgattgtactacatgtactattctttattttgctttttcttattgaaaattgttgttgatctatttccccttcagtaatgacagttctgtttcttagattgttggtttgttttgctattttaataacagtatgaagaaatacctcttttgtatgtttttgcacacttctctatttccctaggctaagttcttacaaatagaactgttaagggaaaggtaatgcatattttaaacttcaatatatgttcataaactgctctctaaaaggttttgccaatttactctcttgtcagtattgcaggagaaagtcctttttgactaactcttttacaataatatgaataacagtttttgccagtcaggtgagaaaaaagaaatgtatttctttgattattagtgtagttgagaagaatgtcatatgtttgtgggcctttatgtttctctcgggaacagattgttcatgacatgtaccttgtttttcttaagggtgtttgttttttctagtaatttaaagagcttttaatatagcctttgatacgtatgttgtaaatatttacatacgtctttttcttttacctcttatgatgatatttgttgcacaaaatacctaaaagttgacatatttacacacatcccattcttttttgcttatggtttctggcttttgtttgcatgctaagagtaaaaaccccggtcaattttttttttttttttggatgccaaggcactttatgtgcatgttcttattgaaacctcccagcaacccaatgaacagaatactttagcttcccttttatagatggtgggtaatcacttatccaaggctacaccgttttaaatgatagtgccataacacaaatacaggcagtcagatatctccctaggcccaagattattaatacaaacaaacaagaaaatctcctgtattgtagccactgtgttttctttttttaattgttaaatatttaattcctgtggggttcacctgtttaatttcattttcattttatactgtttatttatatatgcacatgtgtctacatgtttcctatatactcttattataataatcatcatttctttgtcagtaaaacattctttattctgattttagagtaatttttatatctaagggaaagtctccctctttattttgtctttaaaacttctctcgactattcacacatatcttttcttccagaatcaacatgtaaaatttaatgtacaaattctccttttaaaatagtctgtaattgcactaattgtaattgcacaattatcgtcattacaatatttatctttctattcaggaaaatagtatgtcttttaattaacttttttagtaaagctgwatagttaacttcatttagatttggggcatgctattgtaggtatattcctgggttaaattttgattgtgctcattattgttcacatgtacgtatgactgcataccattttgacagtgggtacatgttaaatcattactgtttatgaagtcagtgtccatttttatgaatattatgctagttcatgtcctctttttagacattcagtgttagagagtgaggaataattttaatgtcttgatggccaagactctacttaaccagctgttggtgactgaaagtccagtttcctttagatatgactcatagttcttggttggttcaaattctggatatcaatttaaaattgtatttaaaaccatagtggtccttaggggcccagaattcttcaaaattgaactgaaagtcacatagcaacatggaaataggcaggaagtcacatttaaattcttagcacaaattaacctccgcaaacaggtttgttccctgccctgccacccagcgtgggtgcttgtgtcacagtaggttctgggaagggttcagtattctcttgagattgggaggcacagaaacatcacacacattcacatggaggctctttcctaatccctccattactgctccctgtctcccataaccaagagaaaggaggcctttctttacaaagcgtgaccaaagattgtagaattcgaagttgaatggagagtgtataagaaattgaattcctaaaagaaatatgaggatgtaaagtaattacaataatcaaagaaggtcagagggaggagaaaggataataaagaggaggtaaataagaacatgaagaacattgaaccttccctttgtccccccaaaaaaagctgcagaggaagttggaggatatagaggatggatgaaaggggcaagacagtagaaaaatgcagcaaagtaaagatgatggaagtttagtaaaatggactgatacttacaggcatagttggcttaaaaaaaaaccctcactgatcctttcctttaaactgctcagtagctaaataaagaacttgttgatttctctctctttagcaggctctttcagtagtacattttgaagatttcttcatagaacattaggatattttactacctgactgaaagtggataaacagaactggaagatttctgctttgcacatttctgaagctttattttatccttatataggtaaagagagaagttatacactgagtatgccaaaatgaccacatgcttcacacttgcactacctctttttatgaatctaaatttggagttttcaaaacctcctgtttaaaaatacatcccaaaagacttctgcttattgcacattttgttcctgtcctgtacaactgagattttcatttataattctttttggaatgtttttctttttgtcataaatacaaaaggaagctattgacatataatccttcattatgttttatgcagtagcatcataattctcaaattttgagaatatatattttttctttcaagtctagagacaaatcttacaagaaagtttaattatgtgttcatgcatatacatggaatcttaaatataattgaatgaataaaaattaagttgccacaaattagtttatgcaggcatctttcacttaaaagatagtttggaggagaaaaaattcactgacaggtttttctattatatgatttatattttcctgttggatttcatgataaagttrcagtttcattttatcaaagggaaaacttgttccttgatttttaaataggaagtcatattcagagatacattagtccttttaaaataacatatttaaacataaaatagtaatcttataaaatttattaagtcatacttagagtattaactgttttctgttatgctcaataaaaattataaattaaaaatgagggtaccagaaactcttaaaatataataatctatctctcctaattttactcataatataattcattaacccattattccatcttccaaaatgctaacttgcctctttccagctatcttgaaatgtacttaactgtaacatatctatactttaatgtatgtcactgaataagataaatttagagtatgtgaagtttaaggctgaatgttttgtggaattgttctttaaactaacccaaaataccacctttagactgctatagctgatactggagcatgtttcttgtctcaaggagcaaataatctttctaatattaaaccccagaatcagagagatgtacccatccagttttgggagtggtggacaactgcaggctcccctgcagggaaaagacttggcccctgtgagacatacagcacctggaggttgagcacatgctccctgtaggtgagctaactcccaggaaaaaaaaaagggatagaagaggcagactatacattgccctttttaaatctaccaggtcagtcactcctcctggaagaataagtgtcacgctagtagtgctccttccataaaaaaaactaaaggagtgrggaagaatcattccctcccatagcaataatgatgtgtgtaagacagagttgatgaaaaaggaagtatggaatatggtgggaacatagcctagcctaggggttcattggaagtgatatttcagctgaaggaatagggagtaggattgaggaaggtgggtttgggcaagaagaaagatgtcttaacacatctgtggaatttacagcaattcagcatggccggttacagcctaggctaagagacagaatctggagtgatatagcaggatatgtaggcagtgaccagatctcagagtgagttgtgagtcaaattcagatgaataaagggcaacagaaacatttgaagggtttcaaatagagcgatgacagaatcagatttatgttttgaggggacaatcattctaactgtaatttggagggaagcaaagctagagagagraagatctattagtggtatgcaaggaaaggaggtttgtgggaggggacgtgtagattagtatagttttataaattttgcccttgaagagcaagacattcaaataaagttgttaagaaagttagatgggtgcatacacataagtctttctgtgaatgccttttatttgaaatactgatcaatgggtttatgttaaagctagggtagccataaatttaattagccttctcccattttgatagagactttgtaatccttctgagtattttctttagttttctgatgaatccacttatttaaataaaattattcagttaaaaatttttttgaaagaatataaaaattcgctgtttcctgccactgtttactacaagatactgttgatatgtggtaagtgttctggtttatgggaggagaaaggaaagtttaagttcatttttgggaagacacatttccattgacattgaacttgctaaaattgcatgatcacacacaaagtgattgcacagcaatttttttttttagttgctgccaatatacaactatttaaaggctggactatttcaaaagataataatttgttatcaacattcttaggtgcagataaagagcctggaaccatgtctgrtaaaacccttcccaatttacaccagaaagtctktggcaaaggtaatcttgtgctgcttagctgaaggcccttcagtatcaactaataatgtagcctgctgcctgctgtcattttttcactattagaaatattatcatattactatttttgtaccttttgtgtaatgttataatagcttctaaaggttttctcctaatattttgagaacttttgtttgcattcttgatttgaaacagtgtgacctgttagtgcctatcggatgaattataytctttgaatgtctctttttctaagccgctgtgctaatacactttttattcattttcccctgtgttataataactatgtttaagtctcatggcaatcttctttagtctatatatgctgaaaagatttatttgcatttctatccagaataaatcaaaataaattttgctggaaatggcatcatgtgaattgagtttctttagcttgcaatttttaatcattgtgctttatctggtggaaatgttaatgtttagtggcaaaagaattgtaaacagtgtttaacacacctttagtcacagacactttcatagaataaagggggttgtttaatactccaagaattactattcttatttgaattttatttctattgttgccaagtcattttttaaaaagaaaaatgatcccagaagtagataaccttttttttttttaataaagcagataaacttactgaaaatgacgtataaaactcaatttttctggtrggtacatactcttttgattaaaagttatcttaaacgccacatacctgaaaacacagttttacccattcaacaatcttgatgttcactgtcactgtgataaaggaaatccaagatattagatagcaatattctagagaaaaataaacaaattatatttccttcccctgatgaagttgtctagaaagctcatccaggccatggggtgagaccaagaagtgagaagttctagtgtctgaaaggaactgcagttgaaggactttattcttagcattatatatatgtatttttttaacctctctttggttctcagatcaacaccaaaatgcatgtgctcaccttctcttgtctttatgttttcagtaggaggaaggctggcattagcaatacaactttgaactcaggaagaaagtttagcctgaaaaagataggctgactagggtaaagtttgcagccttccaaactagcctgttatctttataagtttatgaggtagtaaaatggaaccaacatttctaacagaatacagtcgtgtgagcctgtcattctgaaagggactttatgtgtgctgaggtcaaaatccagtatgggaacccatgcagggcaggatccaggttttgtggcttattagacttgtgcagtttcatggggccctctttaagaaaaagaatgtggaattacaaatgcaaaattagtgaaaagatctcggaaggggcctatgcaaggaaagggccctgtacttaaacttcattaattcacaataaattyacttctaacctcatacataaacctgtatctaataagttaaattgtgaattgataatacagctaaatattttaaaatgagattgaatgtcacattcttgaggaaaccttccctgattgctttctttgtaatgccactgtgtcacatatacatggtgtggtaacgatccatttacccatctaatttgctcattagattctaagctgcagactggctaggatgtcttgcccactgctgtatcttttgtkcctagcacagtgcttagaaaattgtagttgttaaaagtagagtgcagggatgctggagtcacaacaccttcgaacgtattccagcagcaggctcggtgccgtgcctgatgtgccgaaaggtgcctctagtgctattacaatgcagacacagtttccatcaatcatatggacagcagctgccaagttctcttttacttggtgagttatggatggcaaagatgtctttcaactatgcacaaaaattggtaaagaactggctaggtgtccatccgtcaggtaggaaggagtgattataactgatctgaaggtagagtgagatacaaaatgccctctgaggatattttacttattcctgagagctgctgctgtctttgaacacctttgaacatttactttttaagacaattagatcaagggaaaaaatcatggaaagcatgattcaaagatcaaattcttcaatttgatgaagtcacacttcatctaactgggtcattgattttaaaccagaagcctatttactaattttacagcaaagatatttaactgtttctacaagtcatcataataaatgttatttctaatgaacagtgtcttgaacttaaataagagagagaaaaatagtggcatttcctctactccccaaataattctattattgcttaagtttagtgtttataagatttaaaaataatgggtgcaggttgggatgaggatctatataaccatggtggattatttttaatactgagaaaaacataggataaattctgcaagtactatactttttctgccaaaggagaaacatcctaaaacaagaaacttaggggctgatttaagaaaaagctggatgaaagatgtccagaccagctacataatttatagtgcccagtgaaaaatgaaaatgtgggaatcctggttaaaaactgttaatagtttcaagtcagcaacagcagagcattgaaccaagtgtggggctcttctaagcttggggcacatgttacgtgcccacgaagctagcccttawagatgcctttgcgtggttcctgagagctgctgtcaaagaccgtattcaccatgtaacctggtgaattgcaaagaaaaattcacatgataaattcctctttgttctcagcaccagaatagcatttatcacccgaaatgacctattacgttcctgtaattgagcaataggagctaccagaattaaatgttgtgctcaaatgaggtcgttttgctcagtctgggttttgggatgccatttcgttgttgctatttgactttgattttatatgcaatgttaatgggttttggtctttgtgttctaaggcatctcaaatccttttttggaagtagagacagtacgtaagtaaacaaaactcttaaaagtagttttaaaagttgattttaaaagcctatcatcaacattattcactgrtggcagtaatagctctattaatgagattaatgcgttccaacaacataattattttttagagactycataactacaggcagaaataatccaggaaagcagaaggatgtgttccacataagcaagaatatataacaaattttaaatagtgagaaaartatctttgtcttaagcaaagctcaggcaactaaggttaatggaggtgaaggttggggctagtttataattgggaatggaaarcccactggggacaagcttagagcgagggaactgctggcagacaaccctttgctgtggtgatacaggctcacttcagaaaatgtaacatatactcttttattccctgaagtttccaggagccttagctgggatcccagaacagtaaggaaccagtctggccttacagtgtgcatttgtgcattcttccccaatcatcccacaagaattaaattggattgccctttaagcagggctgccatgttcagttgtggaagattttccattgcatagactcattgggtaawaggcagtggcatctgcgtttctccccactttacggcgatcaagctgcatcccctctcatggggctgtgctccccactacaccagtcccaagaagaggcaccatatgggctagtgtttaggactacctgagtcagctagataggcttagtaggcaacctaagtattcaagaatcccttaaagtgagaaaatgcctttccttatcaggaataaaaaacattgccaattagagagctctagaaagtgaaaatattttgagttaattttaagtatgaatgagtgctaattagagtggaattttaacagcagtcattctccactttttgataagattatgggatgtgaaggaccagagcctctatgtgggagttgggagctaggaaatgcagaaaattgatgcagaaggaaatagcgtttctcattacgttggctttggtttacatgcctccttcctaaaggacttgttaatttaactattacttgtatatgttaattgaagtactactcgatttgagtgtaattttctctaagtttttcttatcctttggtacaaagaaatcatttgtattccattgttaaaactgatgaaaacatgtgaaatcatacatgaagacatggaaagatacaaactgaaaaatgagttaacattkttgtartattaaatgggaacaaattaatttccatcgaaggtaaaataatgagtgcatttgtgatttttgttgcttactcatcataattatgagacattatatttaagcacatataaaataagcacactttcacatttaaaactctagtgatcttctgtatggaacttacactgaaataactgccctagctggggtcgtctccctccttgattccatcgggcttggctgccttccctcaatatgtgttgagtgactactgtgtgccacgtttgttmctagwggatccaaaacccaaaccagaagctcccagggttgcagtgtaattaatatggggtgtaattatagccttttatgatagtctgtttctttccttgttactgtagtcccaacacttcctgagatgtgccctttaaccaagtttgtcccaagcctccacatcttaggaaaattataaacttttctgtgttctgtcttttctgtaaaacctttacctgtccccctagttggacctaatcacttcctccctggtgtttcacagagcgcctcaaaatttacttttctatcgtagttatttctatttgtgtttttatcccccactaggtttcaatgtccctagaggcatggattctaatgaattcttgtatctctattgctcatgatatttgcagaatgcatttctcataattggtacttactcaaaaatatagcatattacacaaatcagattggattacaataatggtttgcatgccaccagttcagggacacaggttgttgaccccaaatactgtagagccaggttgagttactgtcagcattcttaattcatgtttactgcataacagaaaatttaatgccctttgcccaattcctgaataaatccactattatcattctctgctcccctttctaatctgctatccatgcaaacatcatttccattaatttatgagcataggttcataataaacagttttgcgtgctgtactcttctctcagatatctaggagactcaattaaactaaaggaataagcaattttgtctataagtataaacttctgaaaaattgttgcccccaaacagcctttaaattctgagagaagcatgtctagaggtttcttatcaagcttcagaaagtacatccttctgaacatttttaatggcagctcataattgctgcccatatacatcagaggattacctaaactgggcttttcctgcagtgaaacagtgtctaataatttgagatgaaattctaattattttaatgagatttttctgcttcttggcatcaagcaatttgttttacacctttactcattatttttcatttttgaggacttaaatagaagagacatgacagaataggagtcctgtttcatctcttggaccattaattatgccaaggcggtttcagtactgatgagaccccaagaggaatgaatctttttgggtcttacttggtttaacggatttcattctttatacttcaaacaagttttcttagaaaaccattaatcactaaactatggattaaatagtgacaataatggaaatataaccaagaacaaattgttcatggttggtttctccaaggatttgacagctaatttataaaacaagttgtttttgttcagcaggacttttgtgactaaagtaaaattgctttggcaaaaggctcagcaatattctatagcctgtaggggaacggagcacacacagaccttcctccttctttcttgaccctctttccttgccactttttgcaagatttcaatttgcatacctgtcctgacttgttgccagcatgtgcccttgaaacagttactaagtttgctagtataaaaggttctgaaatttgttttatcttgtcaacacaaggtccacattggagagctttcaagacatactgtaggaaacttggcaaataggtaaaccaagtttttttttttcttaagtttggtcttcattttatatagtcatctgcatcaattacattcatagtttcataatccaaacaaacactgacataaaatatgtaagggttgctttcttaatctggacgttttcacctttgttggttcttcagtttgcctagctgggtgatgtgtgttagattacgtagttgtgtgtacaaagcgagagctttctcccttccagacacatgttatatgagggaggcagtgtaccaggtattacagagtgctggtaattaagcctgtgctgggaaaagtagggccaaaaccaagaacacatcttggatgcttccctcaagggtcttaggtgtagttggggaacataattgtatttaaaattgtgaataacagtaaaaagcagtgactgataaattgccaatatgtagaagagagaataagtgttatagaaatctagagaaggggtaggtaggctagagtggccaaactaatgttatttcttagaaattgaactgaccgttttcctcattcattcttttattccatctactcatttattattaaccaccttattaataaaaagcagctaacctttatttagctgctcaggcactgagyattatatgtacaactcatttaatatgccatcgttttgcagattaggaatccgaggcatagcatttgaccaacttgataatgagtggaagagactggtgagaaaccaagtctgtgtactccagagcctggctcttaaccagcatgtcctattgttttttgcctaacatttgctgacagcttgtcaagtagtaggttcacagagacagctgggatatagagatagtggaacaaaatccctccatttgagaaaccacagaagtaagtttgaaggccaaggattctgttgcaggacagtgatggtagcttctgaattcaggggaggcacacctgtgggaacatttggagatggagagaaggaagttaatgaccaggtggtagaggactttgaaagccagaatgtggggtttttgtttcatccatagcttcacatrtcatcttaggaccctctatttgggatccccccagagcttgtgaaaaaagcccctttgggatcctttgcccagagctcttgttcagattcttcttaggggtagggctctgaaatttgcattttaatcargcaccctagatgattgttatcccatttgatgtggaaaatcactgctgcagataaaggagtacatatggtaaaacaccatatttgtttatattttaatatgttttgcttaaatgaaaacatttttgtgtggtataaaaaagagaaaatctttatcactttatcaaaatctgactatcactatattgaagtttaccagaggtatattggaaatatacctccgagagacccagtatgtcttataggcagtggtattctggtaaatgttttaacaacgaactctctgaaaacaatgcacaagttttgatttgtagcatttgttgatttcaaggtaccaacttaatgtcactgaacatggggttaggaagagatgtacacagttgggtccggttccccactgcctaactgcctatgagtttgaccagtgagtgaccggcagtattagaagtattagtgagtatttacaagaaaaaatatttatatgtatccaggttttataaacttttaaccacttaggctgattggaagttatttgcatcataacttaactttaatccttaactattttcaaagcatgatctcatacattacctttgaattttgcaaatattctgtgagattgccatggcagggaagatattagccttattttgtagtcgagaaaattgagagcaagtaaatttaaagaacttacctaaggtcacaatgctattaagagacaaagactgattatttctagtcatttctcttcactgtatactggatcaatactatgtaacaagctacaggttacaaccaagggggcctatgtgtacaatgctaagatactgacactaaggatatagtgaaatcataatttgggtatattagtagaggtgcttctacaactgcacatttctttgcattatactgtatgaatcatcgtcaagttgagacaggtagggtactccttccaccctcactggagttgttttgttgtcaaacgcagagatgataaacttgagagaaacagttcagagactggaaaaagaccaatgaggagctaatgtcacctggaagagtcttatccttgttccagtggctctcattgcatgatccctgagacctcctgcagcatcagcatcaactaggaacttgttagcaatgcagatccttgggtccccacctcagacctgcacacactgtgggctgtaatcgacaagtcttccaggtgactttgttgcttcctgaagtttgagaagagccctatatcatcccctccaacccagaaaccctagagaagtttgtgggatcttaaagaagagaaggcatgagtgtcttattccaagttgacagagtttaaatcagaagtaactgagtagtcactaattagattgcatttacttgaagtgactcaattaagttgtctgctgttagctggaattgggggtttaaggtaggaattaagttcagtttacggaaattaagatagttacacatcatacacacctgggtttgtagcttataaaatagaattttctatgtacactctggatgcacttgcaattttgtcctggaatgaaccaaacagatgaagtgaacagacagaccttggtgcctcatgtagtgtcaggaggtagttcatacacttggccgaattaagactcatgatgtacggctgtgggggtgggggcgacaaagcttttgaaatggcatgctgtggcaaartatgatccacgtgagttttccttggcctttggcaccatggactctggccccctaccccatggccttgacttccctgacctgattgtgcttagtgcttctcctgcagcttggcaacgtgcatcatggtctcaactagtgctaccgactcatcccagttggcttgagactttctcagttttaacaaagaaattcccatgtcccaggaacctcttagttctgggcaagccagtagagttagtcactctgttcgtatcccacttgacttaagacctccactgggtgttttctttgctttttccactggtgcaggttggtcccgcatctttggcaggctggcaaccccagcttacactgttgttggttggggagccagggcaactggctacggagagttgctgtgaaagagtcaactattactttttgtacatgtaagatttgtaggaagcatgattagaagttatttttaggctgtgttgagtatttcttgctgatttggaaatatctagtcacatgtaactgacatagtaatttaataaattaccaactgcaatttattaaagcttggaaacatcttgctktggagtgacttcaattaaggaaaatcactttgagtggaatttgaaaacttggcatggtactggggtattggttatttcgaataaatgggtgatacctgaaggtggaatcttaagaaaattaattctggcatatgtggaataaaatagagggattatgagtatggaggctcatgggagaacacatgttagtctaggattgagatgataaaggcacactagggagttaatggtcagaataaaaggaaaatttttgaaagatattttgaaggaagaacggatgaagtactgagctgggtaattgagagaatgatgacattattaatgaaaaataagccagcctaaatttagacaattgcaatgaattaaactttaggactggtaagtgtcaggaactcagatgatttcaaacagttaaggatttgagwtaaggcycaggagaaaggtgtgggctgcatatgttsatttgtgagcatcttatcaaaggtgatggttgaagcactggagttggtgtagtattcttgcatcagtaggtaggtgatcatcagaagcagacagctgagttgagtaatgtcaatggccataaatcttttgyttggtccttaatacatttggtgctatgaaattaacatttattcaggattttattgtggttccttccatgctattttagcagtgaaatttcagtgaaccaattagaacagtgaacttgattgcacatgctaatgaagatcttcttaattaacttttaataataaaaactccaagttctcaagagctagtttacttccataatgataaggaaattagagtttgagcataccaatagtagtgtgatcccttgatttctacagcatttataatttgcaaggcattttattattttatcaatgaccaaaaccctttgggacagttggctttctctctaatttatagataagtaaactgagtctcagagtgagtgcgttgcttgcaaaggcatgtagtaacatcagtcataaccacgtcagattgtcttttagttctttgaccratgaactttccacagtgccataattgctggttgccacacattaacactagcgtagtgggaggttsctccagtatttccccagcgcagtgtagatttcagaagcttttgatgacatgccttcattaatcagagaaagatagaccctctatatatagaagttttgatggataaatatatctgacattgctataaggcgttagtaccacaatttttagattcagtcatcttcactgagaacccaggaataaaattaggctgattgagggcagaagaaggctgagccaattaaagaaaaccctgggaagccaggattaagtagcacaaagacaaagatgagtgagctgatgaaattgcacccctagctgaaaagcagcacacttgaaggaaaaccatagaatgttccgctaacttttagcagtgggagttacataatctaataattaattgtctgtagcttccagatctattagggaggtgtggaacagactccagaggcaaatcactggctcctgtgcaagtcaggaacattgccttaggcactcagcttcaaattggtaatgtttacaagttgttttccccataattttttaactctgggcataatctttttcctcttaatgggtattttaagtgtatcttaaagatttttcaccggctttacacttacgattggaaattgtctagtttgtcactatacttctgagtgtcagagtacacatcttatttttgtttttttttyccccctaaaagacaatgttcaaaatacaaggtgatagaatatccctggcacactggagaaaaactgagatcatgtgcaaacagaaggatacatccttttaaaatagtttaaactgccattagaaatagaaggaaacccattttatctgggttactttgacagatgtaactctcacaaaggatgaatatcaaccaccagcaccctcttgtctgacattctgacttgaaaaggaagagcccctgcaaccacatagcatggagaggagataggagagaggctgtgagtagatgaaggctttcagtcatcaggggccataggtttcgttttgatgtacataaaagctgaccaaggactttgtgaaaactttgggctgccttcctgaccaccttggtttttttccttcacccrtagatcagcgtcattgacaactgcattcttttcaagtggcaaaaagaagttaaaaataaaattctattttagatgtacctttgattttcttcaaaaacatttcagatgacatgaaagagaaatacgtgataaattttagcagagacctggcagagtcttcctatagtttaatcaaaaatgggctcagtttcaaatatattaagttgccacaggagaatgggaatgacttttgggaacagttaatagttcctggaattttaatccccttttatcacaatactgggtaaaagttccaaggtaagtaggcaaataatacttaaaggaatattgcatgaaatstaagaggtgacgtatttaaaagaagtatccttgtacagctcgcctttcctgtgataggtgctgcatgttttttttttttttttttctggataatttgtcctggactttgtccaggacagaaaacttcggtgtttctaaagtttatttagtcggtctcatctccttaacaatgtcagaagaaaccttttaacttggaacttggtaaaagtaatagaaaatattgtttaagatctaaatgtaagcatttggggtgaattctttaaaaaagtctggctatttcctagatttataactgcaaatactgtacaattaaaaccaccatggtattcctcatgattcttcctatttgggtattgatgaaggccttaatcaaccatagctgtttagaattttgagtgtagattgtaatttgggatattttctactgrggtcctggatttgcattgtgttctgatttcttaccctatactgcattttcccctatggaaaaagtaccttccttgtattggaattttttaaaagattgcagttatttgtaatttgtaatcccccagtgtttctagtttatatctttaatgttgaaatatgaagaatattttattctattttccaaacagctggtaagagaattcctctgagaaaaaaatatctgcctggactctcacagtcgtctcctaatttatctttctgcttctgctttccatgatttaatttttttttgtacagtatccagagtgatcctattaaaagtcagatcacgttactcctctgctcacaaccatccagtggcttcccatcttatcagaacaaaatctagaaaagtcatcctcttccacggttctataagtgatatgcacctcaaatctttctggcctcatctgtaaaaaccctcttccttgttcattctactccacactggccttcttgctggttcttgcmtacagcaaacacagacctacttcagggcttttgcatttccctttatctcttctcccagaaatttgcattatttgcctctcctcctttctttcaggtctctgctcagatgtcactgcatcattgagaccttccttgaccatctgaagttaaataggaccagtacttcaggtgtatacagagtccagaccgtgagatctttgatctcagaaattaggagatacccttaggggattagggcttcccaggttctagaattgagatggtcgttctttctaggtcttaaaggccaggggaccccagctaaaatttgggtaacttcaaaatacaaatactttcacttaagttacactgctgtttatcaactatgtgtctgtagttatttagtttgttaattgttactccacaaaacaaagtatatactgaaaattcataaagcctatctttttgcaaatgaaaatgtgatctaatggtctctttgtgaattccttctkggaaatgctccattattgtcatagttggtttatagccttccttggtgttaaaaagagaaaagatgttttctctttccattattgggagctcttttctttctgttgtttctgttcttcctgccctgtggctgctcagattctgtgtacagctgtttctatgaagtaatctgtgatctcctcacgttgctgcctctttgttgttttcactacatgtagaccacagtgtcacaataagacaagagaataaaataaaatgtttcctattttattaatgatttaaaagtccaatgccattattcaatgaaaagcccaagtcaacaacattttagtgtaatttagtgagaagtgttctggtcacttggctcaaccatgcctgcaagccaagtttcagtgtttcctgacactgaatcgcctgagtaccattgtggttatacatatggtgggatgacgtggccagttgaggtatatgtattaayatgctgaagaaaagagagtagtggcacttgcttcgtgagccaaaaaactgcaatcacttttaaatatatgccacaaggctgtgctgggatatgaaggaaggtaagatagagcctaggtctgtctagggattgggctgcttctgttatataaccacagcaagtcagttcagggattttagcaaacctttgggaatagcagggactgagctttagatgatggctctgaactgctggtttccaaccactagggtgctctacctgtgtcagattttcctggatcccatgcatttccccagtccatggtaarggaatcactgggtatctgcttgtcattccccaatacacagcattctaccacattctgacttagaatttccttaccactattttccccccactagcctctgaggrgctttctgaacatatagcccaactccttgtatatgtaaggcatttgttacactttgatggagaaatgarattgtgtgacttaacaactattatattttcttttcattaatccttgtactatatttgcatgagtagaattttgtaaggttgtaagctctaggttactggaagaaacagragtccgattgatttgttctgagaaaaatgactggataacaaagctaggcatatagagttgaatttaaatccttgagatgatctaacctgataatgtaacatcatccatctgtaatattttctcagtcaatttttctggtattcttcattttctttttgagaaagtgaagcatatatttatagcattatagcatatatttatgccattctctattcttaaggaatagagacagtattattttctcttcaatctgtatttcatagtgacatcaaagtaaaattctacttaaattgtgtgctaatcatagctttttatgttttcccttttctgccttctacttttttctactatatctccacttcaggtgcttctctcacattttccttaaatgtttctgtcagttccttagtctctacaattcaagagatttctatgaatctcttggtctattatgtacctttagaatggaagggtcttactagaaaaaaaatatttttatctgcatcacatttgttgacagaaagagaccttcatgctctgttgttaggtgcataaactagcacaaaacaatagatactgagtgctctacttctggaaaaacaaatattttgttttagctatttgcatatgaaaagatgtggaaggttacttatcaaaatattaactgattgtttgagaatgtttagagtcttgttgattgcagttttccttctttcttttttccccactatttcatgcattcattcacatagtcattctttttctgtgcatttttattttctgattttctgtattactagtgtaaaagcaaacactaattgggaaaatatacaggaaaaaatgttcgatggatgtaaagaaataattgtgaacgtttatagcaccaatggtgctacgaaactattcttgacttccttttctttggttctaaggactaaagcataatccctacttctttggagctttggagggcttggattgtgtcttcctcttagagttagaatgatccatgttttgccaaagtgttcaagaaagggccccatgttggatgtcccttacagctttacctgggcatggagaaggcccagtcacacagtgatgacttgtagcctctggacaaatgtcatagaatggctgtgctccttccaaattccactcagagtggggacagctctactgcttgctgagcagtctccattcagaagtgtttcccttaaataatatggcaaaagccaaaaggtaagattggggaagaaaacgtggacctaggctaagatcatctcctctcccccactgccacctacatgtttgttttgtttacttgaatgaaacatggagctgttttaaatgtctgtgtaacacagtggtatcaataaaatgcagcttagttaaaaaatttattttatttttctatctgtgattacgttaagcttccgtgaaaatggaatgcaccagtttcacagcaggagaagatagatacagcaagattagggaggcaagatgttcaggattagaaggatctgtatggctgaaagtgaggtaatgataatgattatgtgataatagtactgttgtgctgttttgtgaggcagtaatccagctcccaaagcagataaactatgggggagaaggctgagtttatcccatggaggggaatagactgttgctgaatagcccagcatgacagtaaggctctttcttttttgaggcaagagctcaaaagtaagtttttaaaataaaacgagtaacttcccaaatacgaacaagtgaacagctgagcaagggtaaaagaaaatccaatagtgcaggagggtgaggggttggagggrtggggatgggattctttttatgcaacaaaaactggagttctagtcatatgagaaaaaaatttcagggccaaacacaaaaacaaaacccccctactatgcaaattggcagctgaaatgaagtggtattttctagaaaagtattaaactactgcaaaatgcaaacagatttccattcatctcattttaaatcactatttgttcatttcttgaaaacttgcttcatggaagggactgtaattataacagacaaatggcatattgtccttgacttctctgagcttacagattggtattgcttagtaagatgttgcggctaggcgtgctggctcatgcctataatcccagcactttgggaggccagggcgggtggattacaaggtcaggagttcgagaccatccttgctaacayggtgaaaccctatctctactaaaaatacaaaaaattatctgggcgtggtggcgggcgcctgtagtcccagctactcgggagcctgaggcgggagaatggcgtgaacccgggaggcggagcttgcagtgagccaagatcacaccactgcactccagcctgtgcgacagagtgagagacagagtgagcctctgtctcaaaaataataataataataataataatgttgcaatagctaaatcttcactttttcttttgtattcaggattgactggaaagtaaatgtcactcagtctgaggattcctccttcctgatatatatctatatctgtatctgtatatggacataacatatatatacatctctctattatctaatctgycwctatctatctatctatctatctatctatctatctatctatctattgatgcattccaagcttattcagttctagaaaatggaggagggatggaactcagtcctcagttcatactgatgtgacttctcctgggctccttgcttaggcatrtggggccaatttgatttggatgactccactggcagctggtttcactmtaggacagctgggaaaattttgcttcatctcccaaaggtttactgcttagtactaattctttctcccttgcaggctgccagcaggcatccccttgtggtatcgtcacatcagaggctatgctatcaaatgggttcatatgtcttccaacctgtagaattgcaacccctgacttttstatgtatctggaagctcttagacaccccaagggatggrgccacttctaacactgagacctcctcttctcctccatcttcaaacaaaaactctagctcagtagcctcatgggctgtagtcccagctactcaggaggctgaggcgggagaatggcatgaacccggactttgacctcccaatgcaaaggcccatttagcctctgggggagcccaccaagatagaacttcttttcaacttaatcactcaaaaaggctaacttcaaggacactgagattaccttcaatgttactttytgggagatgtgagaatgagaaacaatagctttcatttctcttcattgaagctaaatttgagaagaataagattaagttaaattctcaggagcttattctgccacccygaattctccacaaagtccctcctgtacttaagaagagggagttttgtgctcgtttgttcaccattgaatccctaacattcagcaaacctcttggctcaggaggcctgatatatatttttgaaataatagtgaatgaatcaggcttaatgtttccagaagttagttaccatgactggatcagtcattgcttatatctgggaacactgaagagcattaattcacagataatcactgagtctatgtaccaggtgcttatctgggcacttggaatctgtcactgaacacaagggcaaagacccttgccttcatggagctttcattctagccaaggagacaataatcaatgaatttattgaaaaagtaagttatctagtatgctaggaaatagatattatgggaaaaagaagggttgagcagggtaagggagatacagagtaaggagcagtttgcattatgaagtaggtggttggcctcattagataagacagtgaacagagacttagaggtggaagggagtaaagtggaatttagggcaagagcactctctgggcagaggaaacagctacagcaaaggttggaagtctgcttggcatttttactttagtaaaatacacataacaaagtttacaattttaaccatttttagtgtacgattcattggcatttcgtaaattcacagtgtgcagacatgactactgcctagttccagaacatttttatcaccccaaaggagaacccatattcactaaatagtcacccccccattcccaccttcctcagactcccggaaattcctaatcttctttctacttctgtggatgtctttggcattttggggaggtgaagaggctcatgtgggctggagtctagtaagtgaaggggagtttcgtaggggagaaagtcagtgaagtaatgggggctgagccggatccctggtaagccactgtaagaactatgacttttactctgaacaaaatggagaacattccagagttttataccgaggggcaaaactctatgcaagagtaggtcgtatgtgtgagacagggtgagaggcagattgactaggaggttatcagtgtaatccaggtgagaggagataatggctcagaacagggtagcaagagtgagagtgctagaaggaattgaattttagtaagattttgaatctaggaccaagagaatttgctgtaggcttggatttgggatgagacagaaaggagttaaggattctccagttgttctaacstgagcaactggaaggatgtagttgccattaactgagacagggaagctatggctggagcaggcttgcaggggaatatagggaatgctgttttgggcaggttgagtttgagatgtctggtcatctgaataaaggtgtcaagcagttagtgggatatgtctgtctggagttctagaaagagttctgttgtggagaaaaaacaacttgggagtcattagcatagagatggtatttaaagctatgagaatgggggaaatcgctgagggattgagtgtgaactgataatgagaagaggccacgtggtgagcactggggcatrttctcctttagtggtgaggggcacagaaaaaaactataaaagaaagaattgaagtaggagaaaaatcatgggtgtgtagtgttttggaagccatgtaatgaaagtaaaccaaggaggagaggtcaactgaatgagatgctgctgaagtgatggacagttggctttagcagattgtggttggatcaaaagtcatatgggaatgggtttaagggaaaatgaaaagaggagaattgggaacagtgagtagggacaaatatttggaagactttctcataaaagctgaaaaaaatgagggcagtacccccttcttcggtgcctcaccttcactagaaagctccatatttcttaattattctaacaaataattatagttaattctggtgagtgatgcatttctttgcaaaatattgtctcagtttcttcctcacagtttctcaggatgctctttgtcatcatttaaaaagaataataaactaatgagcaagataaggagagaaaagaaacagatctgagagaagattctctttctggaacactaataataagcttaatattttacaaaataaaacacttttaaaaactatcctgtaaaggtcttatttatgtactttttataggttagcttataactgtttctataaaaactaagaaaatgtggaaaattttgaagtcatggggagaatatctgaatagcttttcctcctagtttcttggaaaaacaggaaattatatgcaagactcattttaaggcctttacagtgtttaatttacttaagtacataaaaatgtattatgtataacttattaaatgtattatgtataactaataaagtcgtgtctgggataattaaattttaaaaatatggtagattaagaaagcaattgcagatttactaattgaatttgctatttgatgtttttaattttttaaatcacaaatagggttctaaagttgttgcagtgaaatgaatttaacatttcttatatgctcaattaattgggaagcaggcaaacacctgaacaaccatcatactagtattgcacataaatagatcctgttttagctagttttatgctcgtatgacattaaaaaattttagagacaagttttctggaaaagtagctgtatcataaaggggagaaagcccttgaatgtattgaacatggtgggcatgaaacttggtggaattgttggcagtttttgaggtgtcactttccacagtctcttcaggcacattggttcatgtctcattccttctcgcatgctactctactatttcatttgatcattgttttacaatttccgaatgaaaatcagcttttttcatgcactacatgagagggaggaggctaaaatgcaataaatgrtcttagaggattggtctgtaaaagtcttctcaccaaggctgtgggaaggaacgtttcctccaagaactatttggcttatttatctrctatgtgccaagtattatgctaaattstgtggtgcaaagatgagagctagattcattcattcagcgatttattcattcartcaacatttatgcaaaatcatttggattattcaaaaaatatataaagacagtcattatcctgcaacaattgaaaatagagttaaagcttatttttgctttgtaatttaatcaaataaacarctatgctacttgctctaacttacttttctggctttttaagtcttgagttcaaactactttcagctggaatcttagggatacagttgaggacagtgcyattataccagttttcccaaagctcataaaaaaatcctaattaatctttaacttatattctttacattttcatattttggtatatattttcttaaaacaagaaaaatttagtgaattcttaaataaaataatattttcataaaatctttcttcagtctgggtgtggtggctcacgcctgtaatcccaacactttgggaggctgaggtgggcagattgcttgaggtcaggaatttaagaccagcctggccaacatggtgaaaccctgtctctactcaaaatacaaaaaatagctgggtgtggtggcacgtgtctgtaatcccagctagtcgggaggctgaggtgtgagaatcgcttgagcctgggaagtggaggtttcaatgagctgagatcatgccactgcactccagcctgagcgacagagcaagactctgtctcaaaaaaaaaaaaaaaaaaaaacaaaaaaaaaactttctgaacagatctgttttttaagtgggtagttttacaggggagaggttatttcctaacgttccttcaagtgagcaaatctgtcagagtttgctgctccccacaggcacctaccattctacccccaaattaactctttcttatcaatgaaaggtatttccatttttttctgggagagaacaccaattaaatagttaggtaatttggtacctaatgtctttaacatttcttattaataccttatgaattataatattataatcttccttttaatkaataggttatactcccctgcaggtggaacacttagatgagaagttgtaaatatctttaaaataagggtttaattaattataaatatgcctgctaattttaggcaggattctactctaggaactggaaaagaaaccaagaaaataaatgtcttttcagctgtgaagtaaataaccatctagtgagagcaacagagtgagccccacattattcaggtggaattggattaaaaagctctgccagtgagataaaaacaatgggatcagtggtggactattgaaataggaaggaaaaccataccttatttagatatgatactcgtataaagatgttgaaatgcttttatttctctgcattgtcatatgattcaagttgggatgggcccatgtaagatagatgaagcagaagagcaaacagcattgggtttagaggcaacatctaaaacaatgtgattattttgcccctcacagaaattagtgtctcagtaaaagtaaatacatttcctgggcaaccagaaacatatgttgcatgttctttccagtacagtatgaatcctcagtaagacaaaaagagaatggttctcactaagcaaaccttccaacttttatgtccctgagccttcagttgctgttgttggttgttaacatctggctttccatcatcccacttttctcactcatagttgtgggcttactgtgggtattccttggtagtctatcaccaacatgagggcaagattagtagatcaaaatcttgtatgtttaccacttagctgagagccttacacatagtcactgctcaataaatattttttagcaaatgagttaccacgcaaatctcaaagcctttcttgtattaaattctagagtggtctttgaggaatcaccacactgtcttccacaatggttgaactaatttaaactcccaccgacagtgtaaaagcattcctttttctctgcaacctcaccagcatctgttgttttttgactttttagtaatagccattctgactggtgtgagatggtttctcattatggttttgatttgcatttctctaatgattagtgatgttcagcttttttttcatgtttgttgggcacatgtatgtcttcttttgaaaagtgtctgttcatgtcctttggcctctttttaatgggtttgtagaaataccatttgattcagcaatcccattactggatatatacccaaaggaatataaatcattctattataaaaatacatgcacatgtatggtcattgcagcactattcacaatagcaaaggcatggaatcaatctaaatgaccatcagtcatagattggatagagaaattatggtccatatacagcatggaataccatgcatctgtagaaaggagtgagatcatgtcctttgcagggacttggatggagctgaaagccattattctcagcaaactaatgcagagagagaaaattaaacaccgcatgttctcacttataagtgagagctgaatgatgagaacacatggacacactgggaggaaacagcacacactggggcctgttggagaagagtggtggggggagggagagcatcaggaagagtagctaatggattctgggcttaatacctaggcaatgagatgatctgtgcagcagaccaccatggtacacatttagctgtgtaacaaacctgtgcattgtgcacatgtacccctgaacttaatataaatattgaaggaaaaaaatacaaaaaaaattctagggtggactttggagaagatggagggcagggagattctaagaacaaatttttgtgacactctaaaaacaaatgaaagtgacattagtcattgagcttttgaattttttctggtaggactttacctgcaactaaagaaaaaagatggacaacctttaatcttgtatcacatcaatactgtcattaccttgtataaaatttccatttaatgcatgttctttaactatctgagtgataacaggtgaatgacatttttgtatatgcrtatgtggcttacatatttcccaattctgcaaactaccatgaagttagtattagaaacttactttgttatggttagatgagttaaaggagggaaattagatgcactgtatatacgtatgtccccgagagtgcactttccatgaatgatggcttgcatcttctcattttcctagatttttcacttctatcactatcatgcaaataattacaaatagcaaataattttaaatgtcagtaagctagtcttgagagcatgcagcatttactgtcatagagcaaaataaattaagtagaagatgaagtcttctgccttcatgaagttagcattcagtagagaagttgggacaaaaaaaatatgaaatatttgttgccatctacaagagaaatgtggaactacaaccatttgcagtgatcctcaagtcctgaagtggggcaggagtcaatgtggccactggttccaggaatggcctggagaactacaggcagattgtctgaaagcagagagcatatcaaccttctcctctcttcatgggtaacagatgcaccattaaaatgtgaacatcacacatgtaaatcttagactttaatgtttttataactgcaaaagtatagcttaattagacatatataatgaacctatcctatatgtaggatatatatcctacataccctaaggtgcatgaaacataggaatgacttcagaaatatcaaaattaggaatccttctctgttgccatgttttgaaggtaagatttttggagttgtatataattcattttttaacactttgaatgtattactttgtctcaagcctacttaacaccaaagcacattcataaaagcacttagctaattgtgaaagctagtaataactagggaatctgaacctgaaatcacatacttttttttttatttttgttgattattaaaagagaaattaagttatttgctcatgtttatattatggtaggtaaatttaactcccaaaccacaatcttacataggtagacttgcaccacgggactttgctgtacacattatttcatcacccaggtattaagcctagtccccattagctatttcttcgtgaccgtctccctcttccatcctccaccccagtgtgtgttgttcccctctatctgtccrtgtgttctcctcatttagctcccacttacaagtgagaacatacaataattggttttctgttcctgcattagtttgctaaggataatggcctccagctctatgttcctgcaaatgacatgaccttgttcttttttatgactgcatagtattccatggtatatatgaaccacattttcttatccagtctactgttgatgagcatttaggttgatcctgtgtctttgctgttgtgaatactactgcagtgagcatatgcatgcatgtgtctttataatagaacaatttatattcttttgggtatatacccagtaatgggattattgggttgaatggtatttctgtttttaggtatttgaggaattgccacactgttttccagagtggtcaaactaatttaccaccactaccaatagtgtwtaagcattcctttttctccaaaacgttgccaacacttgttattttttaactttttataatagccattcttaatggtatgagatggtatctcattgtggttttcattttcatttttctaatgatcagtgatactgagctttttttcatatgcttgttggccacatgtgtgtcttcttttgaaaagtgtctgttcatgtcctttgcccatgttttaatggaaytgacaaaccacaatcttgattgcttaatacaataaaggattatttctcaccatgtcaccatccagtttgagttagtattcgtggtaaggggacaggtgttgggaacctttgctctgcccaatcttttaggaattccgatttcttccactgataggcttcactatcaaggaaggctgtggagtccccagtggatcctctgcatttggcctggaaacaagggaggaagaagtgtggaggattgtgttgaagggttcatttttcatccagaactggaggtgctagccatcacstctgaccacctttccttagccaaaatttaatcatgtcattccacttaacttaaaggagcctgggaaatgtaatctagccctttgctggggaggaaaagaaaacagagttttgaaacatgcagcactgcttctgccatagtgtttaaacatcatgcattgatgtaaaattttctggactttcaatatacatcaaaagtttccagcttaacacaaagtcaaatgaaaaaggaatggccaaaaacataacaaacaagaaggaaggcatatcaaataaattggtgaatttggaagcacctattttaaaagaaatggctgtccaaagacagttctagtggaaatgaaaggcaagtaactctatttcaaatcttggactaaatggaatagtgtaaagagttacctatctaggaatcctcattaagtagccatacacccttggactattcacttatcttctctaagacttgattgccttgtatgaatagtggacataatgctaatatatgttttcatgcttgctttgaagcaaacaattatatatatgagggtgtttgtgaaatattaattgctaaacaagttttctttcaggctagttgcattaaggaaaaattacttccaagaccacctgtaatattcacctatgactcatgaatttccagttggctagagtagcatagaaaggctttcagatttgtaaaatcaaggtttatctgaggtaacctttgctgcttgttggaagtatgtagctgagtaattgttcaaaaatagcaggttattttgaggtagaacatatgttctttaacaaataaaataagtgttctgaagggaaattttatagcatatttaatcacacacttaaaataatttaaatctggcagtttagagcactgtgtactttgatatgattttttaagtgctttattaagtgcagtaatactaaggtgagtactattgtgtggatttgcattttatgagtagctcttttcaacttctgtaaagaaaaaccatgtcatgaataaccaaaactgaaaaatgtagactaaacattttttatatttgatatgttttataaaattatgaatatatgctttttatatacacacatatacatatataaattataggtatgataaaagtgacttgtttcataagtcaaacaagcaaagaacccttttttatttatatcaacctgttaatgcatgcctcttggttgttggatgtattcatttaatagacatttaaagactaagttgttgttggtagtagggagcccagtaggtgttttcaggatattaacaaaaagcagccataacttccagcacagagctaaacacatagctgatattcatacacaagaaaaataaaatgtagtcaagccagtattttggaattggtcaggagacagataagtggtataaatatggcagagtgagattctttttaggttggagagccgggcaagacaacatcatgaggaaggaagtttttcattgattcttggagaatgggaaaaatttagtcatgtgacagccataagtcagacagggagcatggtatgagcaagacaaagggaggagctgtttgatttgcctrgagaattaaataagtacaagaatattggaaaattattcagctcggaaacataggttgtggccagactgtggataaccttaaaagcccacagctttatggatagttttgatgatgtgacattgatgagttttcttttctttttctttcctttttttttttttttttttggagatggagtctcgccctgttgcccaggcgggcgcgcggtgacgtgatttcggctcactgcaccctctgcctccaggtttcaagcractctcctgcctcagcctcctaggtagctgggattacaggcacgcaccatcacgcccagctaatttttgtattttgggtagagacggggtttcaccatgttggccaggatggtctcgatctcttgacgtcgtgatctgcccgcctcggcctcccaaagtgttgggattataggtgtgagccaccatgcctggcccaacattgatgagttttcacaactcatcatgtgatgtgattaaggaagcattgaaagcacagtttaaaaagccttaattgctgagatgatttcatgattattgttgtttctttagaaaccttgacatctcagcmtatctaggacttttcttctcycaatatcttgaagagctaatttygtttgcccccgtttttaggtttccacttcctatttttatgttgcgtatctgagattattatayaatgccccgtattttagggttcctacaaaagatagtaatgctgttgcttaagcagaaagtaatattgattctgactacgtggaaagtggggtggtaggtgaagtgaggaacacacaaagatataaaaccatgatgttataataataataatactgcataacatttggggaatagcaaataaataggatagaaaatacaattctgtaggagtttggagctgtgattggattttagaggagctagatggaagagttgaaaggacctctaactccaaaactgagtaatgaaattgatggtgtattatcaaggagcttcaggtaaatcatgcagccaatgaagagccttttctacctctccaactagtgtttctgtggcattgctttagcataattcattgtcatcagtaatgggaacaatcataaggaatttttgaagctgaatcttttaaaaagtaattgtgttaataaaaatttyagttgctttatagtttttgcaacagataatggtggaatgtttaggaactgtggtgggtatattttctgtttcttaaaagttgaacaattccgttcttttattttctagttccattgctctcttatttgaacaggattttaagtttgtttaaaatacataaatgtggctgggcacaggggctcatgcatgtaatcccagcactttgggagggcaaggtagggggattgcttgagcccgagagtttgagaccagactgggcaacatagtaaggccacatctctacaaaaagtaaaaaaaaataaccaggcatggtggtgcatatctgaggtcccagctacttgggaaactgaggtgggaggattgcttgagcctgggaggttgaagctagagtgaaccgtgattataccactgcacaccagcctgggtgacagagtgagaccctgtctcaaattgtgtatgtgtgtgtgtgtgcatgtatgtgtgtgtgtgtgtgtgtgtgtgtgtataaatatataaatgtaacaaaacaaaaataagagaagaaaacattgggtcaggtgtggtggttcacacctgtaattccagcactttaggaggcctaagtgggtggattgcttgagctcaggaggaggatcgcttgagctcaggaggtggaggtcgcaataagctgtgattgcgctactgcactccagcctggatgacacartgagaccaccctgtctctctgactctctctctctctctctctctctgtctctcccacacacacacacacacacacacacacacacacacaaaaagaaaaaaagaaaaagtagcataaattaaagatgaagttctacatagaatccaggtgctaaggtactatccattttgtataaataaatgacccacatacttgtctcttgagttttctgttagccacacaaaagagtgaacggtaggaggtttataagattggcactgtctgtagtataaaaacaaaccagctactcagaaagagcacaacccttcctaataccaactctaggcagaaataaatcttttctgtaggttctctgagagaagccccatagaatgtaatgagtaatgaatatccttaaaaacatccttacaagtagatagagaaaacttgttttagtactttaaaaatacatgtttataatgctttgggttaattgcataatgcctaagcatcatccagaaaaaacttttacagaggtcaaaaaaatgtgcactagacacaaactgtaagggagggacttagagccgggccagtcagtgtcagttcacactgcagcatcatctgtggcctcgttagaaaggcagactctccaaccccatctcagacccactgaatcataaccttcaaggcactgttgagaagcacatattaaagtatctaagttgacttaaaagacagttagataagccttcatgaatcatatttcccttaactgagtttagataaacattatggagcagtaaatttggagatttttctttgtgaaaaggaaatgaaataaatataaattcttttactggttaagcgtagatctattgcttttgcctttacccaaacattgggaagggtgttagacattcagttactatctaatatgggtgaagcactgggttaaatgagagatgtaaagatgaacaagacagacatggtaactgtttcttttatttattttttatttcagtaggcttttggggaaccggtggtgtttggttaaacgaatactgttctttagtggtgatttctgagattttgttgcatccattaccccaagcaatgtacactgtacccagtgtgtagtcttttgtcccttaccccagtcccaccctttttcccaagtccccagagtccattagcaggggcaatttagttgyaaacaagttgagggaaggaaactrcaaggtataaacaaagtgctgtgatggttatttctattctctagattttatacagaagaagaaactagctcagagaaataacttggtttagattacacagctaatatgttacaaagttaagaattgaactcaaggtctatgtgatactaaattcagtttacacttctgaaatatagcttcttgaaagaaaagaaagggaaaactattcagaaagtgagaaaaatcatactataaatcagtagcttctctattcaactccagtattttagacaatgtaataattttgaattacatctcctggagcaagtgctgtttttagttaatataaactgaggtgactcttgcagttttcctcaggaggtaataataaagtagggattcttcttctccttttttttttttttttttttttttttaaacagggtctcactctgtcgtccaggctggagtgcagtggcatgatcttggctccctgcaacctccgcctcctgggttcaagcacttctcctgcctcagcctccccagtagctgggattacagacatgcgccaccatgcccagctaatttttgtatttttagtagagatggggtttcaccatgttggccaggctggcttgaactcctggcctcaagtgatccaccygccttggcctcccaaagtgctgggattacaggtgtgagtcacagtgcccagccaagggattaaattttgccaaaataaacagtgccatgattgcagtcccctgccaccccccaataaaagtaagattttattgatatatgaagacaagcctgttttttcttttttgaaacaggatcttgctctttcccccaggctagagtgcagtggtgcagtctcagctcacagcaacctctgcctcccaggctccagagatcctcccacctcagcctcctgagtagctgggactacaggtgtgcaccatcatgcctggctaatttttagtatttttttgtagagatagaatctcaccatgttacccagactggtttcaaattgctggactcaagggattcacctacctcagcctcccaaagtactgagattacaggcgtgagccatcatgcccggccaacaagccagttttatcctcaagtgttgtgtgaggattcatgaagtgtttagcacacagcaggttttcaataaatattgattgaggaaaagaatttaatatttaccctttagatcacctttcgagcccacttttattgggtaataaaagagtagaatgaaaggaatatatttagaattttaaaaatcttacctcttttagaaacattttatagtataccagtcgtcatgacaatatgtgaactccccatcactatgtacttcatacttcagttggcattggccacagtttcccccatatcatactgatatgtatatttgtcttatattcccacaatagtatgagccttttagagagatctttatatttttctttcctatatgggctactgttaggtgtgtgtactcagaagatggtcattaagtatttaaatgaagaatgaatgatgatcactacaattattttaagtcaaatctgatctagcaacctgtgcctttatagtgagttcccaatggctgccttttaaacctggtcaaagccttgctagtcaaagatgatctatgaccatgcttctgagtatttttagtattgctgttgagagggctagcatttacggggtgctaattctgtgacagacacttttttttgtttttttttttgttttttttttttttgagatggagtgaactctgtcgcccaggctggagtgcagtggcacgatctcagctcactgcaagctccaccacctggattcatgccattctcctgcctcagccttccgagtagctgggactacaggcgcccgccaccatgcccagctaattttttgtgttttttagtagagacggggtttcaccgtgttagccaggatggtctcgatctcctgacctcatgatctgcccgcctcagcctcccaaagtgccgggattgcaggcatgagccaccgcgcccggccaacagacactatttaaaacattatttcctttagtcagtacaacagtcctaggaactcttactgtctgtagtggagatagggaaacaggtttataaggaattaataatttattgctcaagagtaagagtaaatgaataactaggagataatgaatgtcctggccatttattctcaaagagcatgaatatacagaataggctgatttgagacattatactgctttcttcctggaaactgactttggtggaatggtcaagctcttactttagaagtcataaagagctgtgtatggagaaggtaacagtcggtatgttaaaacaacagatccggccatagaataggtgcctaatggttctgaaatataagcaaacatgctggacaactttatcattatttctggcatggctggctctggggctcatgtttgtaatcccaactctctgggaggccgaggcagggagattgcttgagcctaggagtttgagaccagcccgggcaacataacgaaaccatgtctttacaaaaaattaaaaaaaaaaattgggtgtgcatggtgatgcaggcctatagtcccagcagctcaggaggttgaggtgagaggattggttgagcctggaagttcgaggttgcagtgagccatgatcatgtcactgcactccagcctgtgtggcagagcaagaccctgtctccaaaataaaaaataaaataaaataaaacatagttgtttctgacttagcagaatgtgttatattggaaactctatgcttctgtgaatccagtactgcaactctctcccactcatttaagaataaatccttaagaatcccaagaaataaacatataccacagttcagtccattgggccagtatatttataggatagtcacacaagtccagaaactgtcaggctgttactctgtgagaataatgggaagggttcttatcttcattcccactccaaagtaaggtttactttctagaagtgagatgcaatataaagtacccacgcaaaaggtttgaggcttatgcagaaaacaagcatggattaggatagttagggtttcatggagcatactttttccattaacaccaagaagataaatttagttgtctttttctgctagagctttgtggaatggagttagtgaagtaaaaggcatattccctttgtttttgttgcagaaataaatgggcraggacactttaaagatttcgtgtgtgcattgtggctacttgtcctaaacataaaatcatacaactaaatgaaaatctctctttcaattcattttaacatagtgatttgctgcttattagtgcaatctggcaaaaaatgttagccaagcagctaatattttgtttacatttttgccctagcaaagatatawcaaatcccctgaygtacacctcttactcaggtattattgtaaaaatcaacaaggaccatttgaacactgataatactaaaaactgtcggttcccttattgtttctttaaaaataaaaccaaaacaaagcaattaactgcaaagggctataktaacccaaagcaaagtttacatatttaaacataggggagtaaggaagtacagaagttaaacaacaagagagataatcttgaaagtggcaaaagtgacttatctcacttaaaagagtctcaataaggctgacagctgatttctcttcagagaccatggaggttagaagacagtggcatgacatattcaaagtgmtgaaggaaaggctatcaagcaaaagttctatctgtagaaaaactcctccaatttttaaggagaaattaaggcatttccagataaacataacctgagagaattttccactagtagacctgttctacaagaaataccaatggaagtccttcaggctgaaataaaagggtattagatcacaattcaaatccacatgaagaaataacactaataaggtaactgcataggtaaatataaaagacagtataactgtatttttgtttgtaacattttttcttctgtctgatttaaaatacaatgacattaaagcaataacgataaaactatgtgtttggctaatagtgtattcagaagtaatttgtgtaacaataacacaaagaagagggtagagaacagagctatttagaagcaagattttatatactattgaaattaacttggtattaattctacctacattgttataaattgagataatattaatcaccagggattaagaaaacaactaaaatgcatactaatagaaataacaagggaattaaaatgatacattataaaatacagattttttataaaagaaggcaataatagagaaagagaggacaaaaagacagcatatagaaaacaaataacaaaatggtagacataaatcctaccttatgagtaatttatttaatgtaaatgtattaaatagtccaataaaaaaagcagatgttgaaagaatggataagaaaatattatctatttgtattctctatgtaagagacacatatgagattcagagacacaaattagtaaaagaatgtagaaagtaaaagaatggaggaagatatgccatgcaaacagtgactgaaagagagctgactacactaatatcagtatgttgtgtrtcagacmcaatagattttttttaaataataaaaccgcatttttatgttacaagaagattttatataatatctgcatgatataccaattttctcataatctcttctgtaatattatttcattaacactctggtccacagcttgattcaacaagatcaggagggcaggcaggaggatgttaaaagaaaggtactgaggtgtaaaaggaaccaaacatttactgactcaggcacctattcttgatttctgttcacctgttgccttgaacaaactgcctgagctcatatgccttacctccmtaaggagcatgacctttgggaatttaccaggtcctcatccctgtggactcagaatcttgcttggtaagagtttataattgacttttttttttttttgagaccgagtcttgctctgtcacctaggctggagtgcagtggtgtgatctcagctcactgcaacctccacctcccaagccccagcaattctcatgccccagcctcccaagtagctgtaactacagacatgtgccatcacacctggctaatttttgtaatttttctgtttttaagtagagatggggtttcgccatgttcaccagtctggtcttgaacccctggcctgaagtgattgacctgtctcagtctcccaaagtgctgggattacaggtgtaagccaccacgtgggcctggctgacacaatagattttaaaggacaataattttactacagacaaaaaaggacatgttgcaatgataaaaggctcaaaccwtgaagaagacataggaattgtaaacatttatgcacccaaaatgtatgacacaaaattgacagaataaaatggagaaatagaaaatttaacaataatagttggggacttcactactccactttacataatggacagaacatccacaaggaaatagaagacatgaacaacactgaaaactaggcctaataggcatttccacccaacaacagtggaatacatattcttctcagtgctcaaggactattccaggctaagccatatttgctaggccataaaataagtttcaggaaaatttaaaggaccaacagcatgcaaagtatattctccaactacaatggaatgaaattagaaattaaaaaaaataagaatttagtaaattctcaaatatatgggaattaaacartatactcccaaataaccaataggtcaaagaacaaagcarggtaaacatacatgtatatccatattaatgaattaatttaaagaatttttagtcacattatggcttaaaaataatttttcagtattgtccaaataaagtacctcattgccatgatgaaattggatacgggagatgttagcttgctaaaaatgacatataattattatgtaagagggacattaaaaggctaacaattaattttgaaggattaacattcttattttagaaaggatgactcctgttaagacattcttgcctatgcatacctgctgtttggattttctttctaatggaatagactagtttatattactatctatcttattgacatctcaaagcccttggtttaaattgatggttcagttagacaaaatcttaacttacaaggaaaagttgtttatgcaagtgaatttagaaatttagctatctatacttttaaaaacattggcagtatatctcagtggtatgagatagtccacatctttttatggactttttgttttattataggctttagtgccattaagggaaaactatttagttactctaggaatagccaaacattgttcccagaaatgcttgtgttatgtctgtcatggtacattgttaagttcagagcacatgtgtttaggagtctcaatgctggctgaagaatggaaaggacttttattacaaatagtggattttatttaattttgaatttayattaaatgatgaaaaaataggtcctgcaataatttagagaaaacctgtctcttcagggcaaggacaaatcaatattgagtgtttcaaytgaattgatgcactttcaattataataatcttcatggtagttgaaaggcaggcccaagcaaaaatcatgatatgcacaaaaatattgctggaagcactatctgctattagctatctgctcatgctgtttaccttcacggaatttcyaggttcaaaatcagccatttatttagaacgccagagtacccaccaaggaagcatattgtatagttttgttctgacgaagcatgtggctagaaaacaccagaaattagagttggggttacaaagagtctatgcacatttcttaagtctgagaggtttttttccttatgataattcagtagattcctataaatgactctttagtcacaagtttttttcatttagaagaaaattaaaggtatttaaataaataaataaataacatgcccattacatgttaacatgagaaacttttttaatgaaagataaacatattttcgaaaaaaatttaggagagtagcagtgtttgcattgttgcaaatagctttgatatttaacttaatacaagacagctggattttcatatctgcttctgcatgcaatctgtagcaatatgtgtttcaggttgagaatatgtggaaaatttggccttccacagataatattgytcaaagaggaagaagtattttaagaatctttgcagacaattatggagattattctataataccacaccgaaacttcaaaagtagtagttttctaaaggttggtcgcaatgtagaagctgacaccatatcaataatttttaatactcttattacattaaaatttgttggtctatcttgcactttgaatgggctttttaaccatgcttgatattgcatcactcactggtcatttggaaaaaatgtgtgtcactaaattatacagattttccaaatgctgacacacttcattgtacattatctaacaaaacactttcattaattacaccatttatctcattagaaaattctaagtattgacaagatatcatggtggccaacgcacaatttcaaaaatttaaagttttccttgaaagttctaattttattagcaacaattactctcagttattttccttaccgtgacaggcactttgggttcatttttgataagttataggccmaatactcaggtctgaataatcagttaattgaatcattcaagtaaaaatgttttttctgtttttaagaaaacagctagtttggcttgcaactcaaacaattgcacaagtacctttcctcaggacagacattgtgcatctgtatgcagcaggaaggctttatgtgcacgtcccatctcatcacacagaatattaaaaagatgcatgcccaacagttgacattcaataaaattaattttttcctgtttcatcaagaatattagtaaataaaatatatgttgtaggttttttcctaaaggtgggggtacagttttaagggatacaatgactgtaaatacactgtgataccactgccttgattgttgataattgacagcagcagttttacctgccatcacttctgtaccatcggtgcaaatatcaacacagtgagaaaacatataacatcttagtcttcttatgaaagtcattttgatgcccaagagcccatgtgccatgctttttgagaactagtgctttatttatatttatgatggagccatccaattttagagatgcaaaaacattaggtacataggttttaagaattttcaaactgagaaaaaaaattacaaaaatcacatatttaggttttaacctgacttctgtgctgttcagctgtgaaaataaaaccatgttattaatataaattgtgaggggaccagtctacagcttctgtactccaaagtacattttgctaaatcaaggtcatatctaaaagacatggctttattatgatagtgtagtttagaaacattaaaacttatttctaaatttattttaattgactwtataatgtataatatgttgttttgaaacatgtatacattgtggtgcagctaagttgagataattaatttatgcattatctttcatactactttttttgtggcgagaacacttaggaatatttctcttgcaatattcaatactacaatgcatttttattagctayagtcaccatgacgtacaatagatctcttgaacttattcctcctatctaaccgaaactttatrtcttttgaccaagagctccccagtctcttccccacaacactgttattagtacctacccttctactctctacttctatgagagtaatttttatagaattctacctataagtgagatcatgcagtatttgtctttctgtgcctggctgatttcactgaacgtaatgccatctagttttgtccatgttgttgaaaatgacaggatttccttttatttgttaaggctgaaaggtattccgtgtatatgtatacatcacattttctttattctttctttattgatggacacttagtttcatttcatactttggctgttgtgaataatgctgcagtgaacatggcagtgcagatatctctttgacatatttacttcatttccttttgatacatacccagtagtgggattgctagatctcgactggaaatattttgtgcttctgcttctgtccttacatagctgtttatgatagacaataaatattaggcagatacctaaacactcttaaaataccaacaaaaaaacctgtgacaccattcttatagtatttccaattttactctttctttacatagtacttgatagaatgctgagcaccctgacttaacacaatcttaattgatgttggtgctactcagttattggaataatttaaaatgtgcctttcttgatcaattagtattttcattacagctcacttatttaattgatctaatgaaacactaagcctattagaatgtgaagaaatcaaagagaaatgtagaaaatatyttataaaattcatctaacatatccactgtgctgtgtattttgcagctattttcaaaaagtttatgtccatgtccatgttttattgacacacatacartcgatacatacattgcttgagatgatagtttctttgatggctatatcttatttctcatatacctgtaatatttagcacatagaatttgcatgaccaaagtttgttattagtttgaattttaaattttactttatgggcataagtttatgaactcatttccagctgagtttaagagttttcaagtgycagagaggttgcaagaaccaaattaaaaaaaaaaaagttgttgctgaaaattctctcttaggctcaagagcctcaattttcaaatgtggttgattttaattaaagtttaaagagaaaaagaaactattggaaagatattggaactaaataattcacttgtagtgaatagggagtttgtggtttgagttaatagtattcattacactgattaaaggcagtgagccattttgcccttgtttattttccaagccagtgtttccagtaatggggggtggctggtatttgatgttttatgtaatgaggtatttactgatgggctactttgacttctctacttaaatggataaccacttgaaaggaactgatcagaagaacagtttcttttctagagctggaccatttattccaaactcagacagtaagaaaacaattgaatagcttttattgccaccagctgtgctgtggttatttgaacaaatggaagactaaagtaatggtacaatctcattttatacagcattacacaaaatcaggattcttttgcctaataaatattgcatttatagttacttagatttccatcattatgatgagtttgctgccctttgagggttaataagtgggtctatcaaagttaagtcttctggaagttcagggaatgtgctgcttcagggcttatagcaaattcatgattatttgttttgcagatatacacacatatatacatacacatatatggaatatgtaacgtggaatatatataaataaaactctaaactttgaaaaattatagttcctcaaccaggaattctagtgatttrtatcacttggctactctagggctttggaaaaaatgagaagtgggtgtttaaatgttttaagaggtaattttccaagcaattgagcaggtagttaaaaataccttgttttcatttccttgcctgagaaaatcctaaagtctaaaggtttaaaagagagtagaaggaactacactgaattgggcctgaagtgtatgcaccagaaaagaagaccttcaccactcaccagtctccagagtttactgatcagtatatgaagtcattgtgttcgaaatatgagcatgggaagctgggcatggtggtgtgtgcctatagtcccagctactcaggaggctgaggtgggaggattgcttgagccctggagttggaggttggagtgagtcatgattgtgccactgcactttagcctgggcaacagagggagaccttgtctaatacacatatatatacgtatatatacatatatacacatatatatatatacacacacatatatatgcatgggaaccaggattgcctcctcctagttgggctgcctaaatatgtagttgcatggtgattgttggtgtgccttttgattcttataacttattaagtgttatcattgaggtgaaaagatctcttgagtttgatagagataagcagtccacacaaaagggctagacaggggtttctcaacctcagcactactgatatattgggctggataattctttgttgtaggggcctgttgtgttcgttataggaggtacagtcatatccctggcttctatctactggcacactcagcccacattgtgacaaccaaaaatgtctttaggcattgctagatgtccccctgggttggggcactgtgtagtggcagaatggtccttgttgaaatccactgtaatagacagtgaactcctagcaagtggtattggttctcggtcatctgtgtatcctcagtgggatatcttgaaagggcctggcatggagttgcttctcaataaatgtttgtagaaattaaamaaaaaaaaaactgtgacttagaaaagaaaggggatttcttttcctgttaccttctctgccactgatttcctgttattggtagaacaggcatagaataaaaaagttcaatgctacattacttataaaaagcaaaagctcagaaaaacttctggatgcttaataatatagaaaaggccaagtacattggtactttcctttgtgggatatggtacatttcttttgtgggatactaccttcataaaacaggttgtctatcaaaagtttaaacgttattttttctgtaaaaagttaggctataaacttacataatcatctgtttttaatatgtatgtatgtgtatacatacgtagtatattatttcttggtgaaaaaagagtaggaggaaaaatgctaaattattagtcatggttgcttttggtagtatgattacattttatgtgcaccttctgastaattattgagaagatgccttctttttctttggtcttctgacaagctaaataaaaccaatagaaaaccagccaagtctgagtgaattttatatcatcattggaaatggattttttcattttttaatgaaaagaaaaataaataacaagttaacaaaattttccctttaattttattattcgattctgtgtaacattgttaatttgcaaaaataaatttagcattaaaattgattctgtgtgctaaacatagcctggaaaaaatgctcagggtatttagtaactactatatggaagtttcttaaaaggtagaagaaataatttctacaaagtttgtctgtattgcaaacattgcagtgtaatattgattgtttttcactattattccttgtgattatctcatggtaatgctttcttgtaraacgtgtaattggggaagaaaacatagatgttgcaagtgtacagtgtgattttaaaagaattacctgttttcaattagagagataatgtggctatatacctgtatgtatatatactctatgtattgatttgtgtattgaagtgagattgtaccggagctttttgtgaaatactcccagctgtcttgcctaagcacacattagatacatacattttagaaggatccataacttagaacattagtggttcccagttttcctcctcaccatsgtgttggactgaacagcccaagtggtatatgtattcagcctgccatatgtttcagtaagagcaaacatctggtaccagtttcccccttgcttttcttgatccagctgtatagactaactttgaatcttagaaatgctgcagtcttccatttcatgcatccctcagcatgaagcacattttttttcacccgaattcctacatttttattaagccttagtttgaaagcacttcttcaagatgggcatttcgtgatgccttcttccttggatgctaagttgtgctcctgacaccccatgcttcctttgcagcagcattttaatacaggatggagaaccctcctttgatacctgccttctgcaggaatctataagcttctgtgaaggcaaaaatcagtcacgtcctgttcaccacagtatctcaggcatctaacaaagtgcccagaacattgatagcatttagtaaatgatgaatgaatgcatccataaatgaaggaaggaatctgttccaacatctttgrgaggaaagagtcagaagcatcaaaaattaattctcaaataatagagattagtacaatatttgttgaacaataacagccattgaaagcgcattcatcaccaatgtactgatttggaaatgtgaagttttggaaatgtgaattttagtaatatsatagattattatggaatggcagtatttcaaatgtttatgttttacaggatgagtgctaactctaccagcaattatagtattaacagtttcatcaaatattttccttgtttctgaatcttaccagttgtgcataggtgctttcctatttgaaagcagcgcatcattcagcctcctgaatgtatttagaccttgtaagtataattaactctttcttgacrggggcatatttaagattttttaaaaaatacatatatagtgtgttgcagcaaaacctttctaagaaggagtcagtaggatgtagggataatttttttctacaataaatatttccagaccctttatttataatcaatatatgaataaggaccactaaatttaaaatgtttaatgagatgtgtatagaaggatcaaaaagatatatttccacagttacaaaatgcaatggaagctgtctctaacactagctatcgaaataaaagaaacctcgaagtaggcctaatcaaagattcaaaatatgttcatgtacaaaaatgatttttaatgaaagtcatttaagaagatttaaatcaatggagaaatactatttttatggattggataagtcaatgttataaatttgctaattcttttcaaattgaggtatgggttcagtaaaattctaatcaagaccttaacaaatttttaaatagaatttgacaagctaattctcagatttatctggaagagtaaaggtcaggaaagaaaagacaaatttgaggagaaagaataaagtgggaagaatggcattataagataactagactactgctrctactactactactactactactactactactactactactactactactatttcttcctcctctttctcctcctcctcctcttcttcttcttcttcytcctcctcctcctcttcctcttccccttcttccccttcttcgttttttttttttttttttttttttttgaacaagacaggatgtctgttgccctcgctggagtgcagtgacatcataactcactgcagcatcaaactcgtggacttaagctagccatcctcccacctcagcctcctgagtagctaggactacaggcatgccacaccatgcctggctaattgttaaactttttttgtagatttagggtctcccttttttgcccaggctggtcccgaactcctggcttcaggtgattctccctccttggcctcccaaagtgctgggagtacaggtgtgaaccactgcagccagcctagacttcttataaagccataaggtatattgtgtatagcaaaatagaccagactggagagccagaaaggactaatttacacataatatatacatatctgaaagaggtgtcattgttgatcagtgggaaagggatgagtcacttagtaaatggtgctgggacaaaagtttgaaattgtatctttacctcatgaaagcacaaaagcaattccagataaattacaaattaaaattggaaatggaaattggaggatatttgtgtgatatagggaaggacagtagtttataaacaacattttaaaaagcactaatctcaaaggaagggattataattatgaayaaaaatgatgaacattaaatataacaaagaattagcattcagaataccaaaaataatataagtaacacagtggaagacgggacaaataagaatagttaatcctaaaatgaaacccaaatgtctactaagcagccaagacaaggattagggaaatrcaaatcaaaactacactgttatacaattttacgcatctatcatattgacaaaattgtgaagttcaatgtcaccaggtgttagtgaagatacggagcagtaggaaatttcataattctgaggaatgtaaattggtgacacctgggagaaaatttcacmtatatatgtagtaaagtttcatattttataaggacccagaaattctatgggaagtataatccctagggataccttctcatatgtatacaaagggacatgtacaggaatatttattcgggattgttcataatattaaaaaaatagaatcaaagtgaatagccattctattagttcattttgtgttgctctaacagattacctgaggctggataatttatttttaaaaatagttttatttggctctcaattcaagtggctggaaaattgtctgcatctggtgaggtcctcatgctgcttcaactcatggtggaaaatagaaggtaagcaggcatgtgcatagatcacatggtgagagagaatgcaagagagcaaatcagaggaagccaagctctttttaacaacctgctctcaggggaatgaatccattcttgaaaggccaagaactcactcacccccaagagaaggcattaatctattcatgaaggatccacccctatggcctaaacaccttccaataggccctacctcccaacactgccacatcagagaccaaatttcaatatgagtttgggtggggacaaaccacatcccaactatagcagccatcagtaggaaaatggataaataatttgagatatttttatgcaatggaatattatgtcggtctgagaaagaatgaactagggattgacatattgtcatggacaaatctcaaaaatatgtttaggaaaaataagttgcagaaaattattatactttatcatttatataaagctgaaactatgcataacactgctatatattctttaaggttatgtacatatgaaataaaacacaaagacatgcttcagaatgataaattcagaatttcagaacagattatttgtggggagggatgcaatgaagcttcaagtmtatttgtaatatatttcttagggatgggggctgtgaatgccatttacgtgacagtagccccaaatttgtatgtctagcccaggcagctttcctgaacttcaggcatgtatatccagatgatctggtagccttctagaatggccagactgaattgctagcatttcagcaaaattgctctacrcacagtgtttcccatatcaattaatgacacttacttctaattgctcaggccagaaatttttgaaaaatcattgaatgttgtcttttcctcatgccctaaattcagtcagaaactcctcttgtctgtaccttcaatacataaggagaggcctgttattccttctcactttacagctaccctcacagatctatatcaccacaatcttttgcttagattttcaaaatagcttcctaattggcctctcagctttcaccccagaaactcttcccagccccaccgtttattcttaacacagctgccagaatggtcctgttaagtatgaatcatgttgtattactctttttctcaaagcccagcagtggctccctatttctcttccagaaaaagccaaagtcttaaaaggcctcaaaggcgctgtgtggtatggtccttgccatctgtctcacttcattcttttaactctccccttcgttgaattgctgtggttgcaagagcctccttgatgttcactggacctgcctcaagtgctcccaccagacatattttatccttgagcttttctctcaatctgcatggtcaagtacctttatgggtttgtttacgtggcctttcccttcctcgggtgttttctcagaagtcaccataccactgagcccttcactagccactctatttaagattgtaacactctcattccatgcttcgtttttgtttatagcacttcctattttctaacatacctgtcatttacctctgtttagtgtacactctttattgtctgcttcccatgataaaacataaagtttgcaaaagccaggatttttgtctgtcttatccacaggcatatccccagcaccttgaagagtacaggtatagtagactctcggtaaacatatgtttaataaatgattgaatgaatatgcrcttgtttgttatgttattctgtgtatctataatgtaacaatttaaagaaagcacctggttgagaaagatgccatggttcagtggtagatactaaaaataattgcaatcatagtatacatttttatcagattttatatctattcttatactatagyttgactccatttttaacctgtatgaaactaggaatggaattaatggtaggccaggtgtgcacattgaataggtagctcagagtaatgaaggaaaaggcaagaaagagctttcccaagagcaagtgtggtattgatacagtatttcctttataataccctttaaactcttatatggaaccttagaaaaacacaaaacctcctattttctacaaatacttcagaatgtcttgcctaatgcattcagtttgtgtcagcttcttgatattattttaacacatctttctgtaattgttttttaagtgtggcactcgagttttcaggagtgttctgagctgtgattgatcatcatacatgcattttgaatagggacatctgtctctgcagcatattatgtctcctgacatgccatttctcagcttgacagagcacctctagagggcataggctttaataagatagaatatgtgacttttttttacttccatagayagtgagtggtgttacattttataatgaaataatgaatagctgaagtgacagcttacccaatttgcctttcttcgtgagccaaatataaaactagaaataaagcttattcattttagcctgtctaatatttacttcaaaaacattttaataggacaatatttactaaataagttttcttgtattcatagttgacagtgacaaaaatggcttctttgtctttttctcctaaatttttctctttttatccttatcattttttctatacctaaatttttcttgcatccttttatatgagcaaattgcctctaatcttgaaacatatagtttattaatttgatttgaaatttattttgatrttatttttaccagtcattcagtaatcatagatagttacattgttaaaaaaaacaaaacaaaacaaaaaacaaaaaaacaggcacaaagctagatgaatgagcgttgtgtggactctgccctagaggagacccaagtttagtgtgagaaggagataggaaacaatgataaagtttgtgcactccagaagaagtaggagcgatcgcctgcggcactgaagaaacagtggcaggctctgcttggatggaggacactggccaagtggtcaagctggcagagaaggcaactgatccatgtcttaaaaagtgcatgtgcctttaccagcaaaaaggagacgagatggggcagacaagcagagcagcaggtgcaaattggaagagtggaaggttttggcctgttgaaagaaagatgaaaattacttgtacctggagtagtaggtgtgcaaggtgggaggaggaggatgacagatgaagctggagaagtaaatttttatttatacrtagaacttatagttcttttcttccattttgatattgtctgcctgactcaagtatcttattttacacccacaactgcaaatatctcccgtcatttgaaagaagacttactggaagtcattttcctacctcattttctcatttcctgacaacttctttcgactgtcttgattaatttccaaatatgggaatattttcaggtcccatggtcaaagattttattaaaaagtcttacctctgattcagctaaatggttagtcaatttactaattaataggaaatgctttgtagttataggtaattaacatgttaatagtttaaataaaattgattgattcttctctttgcttggttaatttaactatcccagagatcaagttttaaaaaaacttgttatcgtttagctttatgcaactaattaccgttagtcctttaccatgtctatgtcattgcacttgcttcttcagctagtgacatcagaaccttcacttcactagcaacatcgtacaaacaagaggaagcaccatcttgaacttccacaggaatctcttcctttcggaagtattttaatcattacttcaccagctatgttccacttctggatattttggtaaattttccgagcatttagaagccacatatcactcctttcagttgcaggaaattggccttttatatcagaacactgtgatctgtgaaatgggtactcagtgactttagaacacgtcaagagattagcttcgtgtctagagtctgcctaaacagttccaaggtgagatttgttatttcacatttagcaatgatttaaaaacaaaaacatacgctttgaatggagtgctttattaaaataatggaagaacatggtagaggaagaactccctgggaagagtttaaatagtataaatagctttgctgagagagcaacaaagttctgtattgtgctgttgccacagcagcaccaataattcaaaacaaggaaatggagtctcatatttaatataatacagacttttccctagaacttctgtggtctagggtttttcagggattggcatgtttacatatgtctaaatttagacatgccttttatgtaatatgatgaaagagaagtacttaaaattctatatgatgcagttatttcttaaactttttttttgttttaaattgactaaaatatcaggaattttctgtgctgaagtcaatgccccaggacattgtgaatttatrcatatgaagggagacataatctcttatgcaccccacatttgattttaaaagatcactttgaaaagtatgaagaggtgtttagtaattcaaggaagaaaaataatttcttttctattgaatattctattgaacattctataacaagagttttctctgctgtggaagtaggtactctgttctgaaagtcaggatctggaaattcagaaacacagatacggacgtttggggaattttaaagtaaattttatatgtcattttggaaataaattagaaagatatcggaccaatctcaggcgtggacagaattcaattcatcattcaataaagtacaactaaatctctaccaaataacaaaatccagtcataataaaagctcgcttacgaagaaatgtttgactgtagcaaactgctttttattaaacgtacttgacacaacacaaggagatggcagtgtgctttccgactttcagatttttgttgtcccaatgttasttcatctcacagcctgcctggcttttccaccaccaattttatccttgttcttactaaagagtaaatttgtaggcaagtttgattgttatgagataagaataaatgaaatggttagggaaattttcatattttgatcttttctacccagtgacatcatgatgaagatgatgcaaaaaattggtcagatatatatctagtatgaatgtgtgtttgtatttactttttttttgaggcaaagtctcactcttgttgcccaggctggagtgcgcagtggcgtgatctcagctcactgcaacctctgcctcccgggttcaagcgattctcctgcctcagcctcctgagtagctgggactacaggcgcccgccaccacagctggctaatttttgtatttttagtagagatgggatttcaccatgttggccaggctggtcttaaactcctgacctcgtgatccacccccctcgaccccccaaagtactgggattacagggtgagagccaccatgcccagccacatttactcatttaataaggacaaatattgcctagaaactagtttcaaagaggcctgattcattttttatgtaaattgaccaaatattatttcttgcatgaaagctttattaaggaattatgatgtaatttttcatttatctcttctggctagtgtcgaaaggggaattctgagtgttgaaaggggaattcttagagatgtaaaaaaataactgaattacccttaaaaagattgaaaagttaaaaagcaaataaaaagaaaatgaaaatatacttatccatttagcaaatatttaaggacctacgtcagttatgtttctaggcactggaaataaaatgaatattgaaaaagacaggataggttcgtgagacttatgtataatsaatatttaaagagggaatttgggccaggcacagtggctcacccatgtaatccgagcagtttgggaggccaaggcggaaggattgcttgagcttaggagtttgagaccagcttggataacatagtgtgactccatctctacaaaaaagttaaaaattagcagctgggtgcagtagctcatgcctgtgatcccagcactttgggaggcccaggtgggcgcatcatgaggtcaggggttcgagaacagcctgaccaacatggtgaaaccccatctctactaaaaatacaaaaattagctgggcatgatggtgtgtgcctgtaatcccagctactcaggaggctgaggcaggagaatcactggaacctgggaggcggaggttgcattgagccaagatcgctccattgcactccagcctgggtgacagagcgagactctgtctcaaaaaaaaaaaacaaaaaacaaaaaaaatagctggcgtgttggcctgcacttatagtcccagctactcaggaggctgagacaggaggatagcctgagcccaggaggtcaaggtgacagtgagccatgattgttccactgtattccagcctgggtgacagaatgagaccctgtctcaaaaaaaaawaaataaataaataaaaaagaggggatttggataataaaataacttattgagatggtctaatattgttatgacttcttcttccatttaatcatttatttaggcattatttatcatgagcacatcaacatttgtatctgcccttttcttctttgttcgcttaatgttatcttttccagtttctcagaaggaaaaagaattaaatgaacctcacatgtgatttgaaaacagagatagtatccattccaggcctctgttttattttgctcttcccctctccttgacactttacttttgggcagatgtgcctgaggaagacttagtgtaagatgacacaaggtggaacagagcttagtttgtgagtctgagaagacttagtctaagatgatacaaggtggaacaaagcttagtttgtgagtctgaagcagaatcaggcagtgataagcagtgtgtttcctggaggatgataaactttctatatgatgaccttgttttatcgtggtattagtgagcatcaaaactattcactgacttatattcatatattttctcaagaggaggaaaatactgcatgggttttgcagccagtcttcctgttcagatttactctgcttaagtacttaatttaagagagagagagaggttgacaaaggattccgtaacttctagtcttcaaatgatcaaaactgaggacctggtgaaggtttcaggaaaccacttctttaattgattctctttccatgtaaaatgtatttyaaaggataatagcctacgatttgactccaaagcttcagcgtagaagaggaattcttctggctgaactatatagctaatgctcaattaccttagcttctattgaaccgtattctaaacaccttcctttgtaaccatcaccttgtgcagaagtctgtatttttagcctttaagcagagctcaagtgctgtatttagacatctgacttgaagactaaaatttgctcagtgagcagaacaaatgttcagaaaataacatttcaaggttagagttagtgtcctgaataaaatcccttttcttctttttctccgtattgaatataacataaataatgtaccctgactgacttttaagattaaaaatcagagaatacagtgaacttggaaagggaagagaacataattaaaaattgaaggggcttctgttgaacaattgtttgcctgaaactaagtacacgttttattcttgactcaataggattatggatcttaaaaggatttttaaaactatatagtaaagcgtttagaaaaagggcctgaataagcctgcagctactgtaagaaatattgaaagaaacacacacactcacagaatcatcataatatccttcttagtatgaggaggaaaaaactaaatactgtttattgctagtagttacagtaattgtatttaccaggttttgactgtctacaatgtgttagtcactgtgcaaggccctrtatataataaaccttatttaatattcacagcaattctatggaataggtattataaatcccgttttgtaaatgagaaataaagtccagaaagtttaataacattcttaagattatatagttagtaaatggaagtatattgtgaatatttctcaagaaaatctcaaaatggtgcccaagactccctgtccttgagaaataaaaacattttacttcttaggggaaatagatgagagtgatacgttgtgattattattcttaaacaagacaatgcaaggtcccgggacccttttttgaaagggaaatgacatatttgcactgagggaaagtgattatcacttgctgagcatttccttaagaattctgctcacttggattatgtgtaatttggtgaagaatttatccccatgtattccatgaggcaaaaggatgttgcaattgaacttcacagtgcatccataccaatccaccgggggaaaaataataaatgagtctgggtactcccttctcttggccacatggttgatgttgtagtcttcactctatacagccagtcaccttgtgaacagaactagctagagcccaggactatttgattgattaaagattcccacccttaaaattaggactgaaagacatgttagaaattctgaatatgttttaggccctgcatttgaaaggtaataaatagggtatgtgaaactctttgacctttttctggttctcagtgccttgaaatttctatctcaattttgtagatactcaacactctaacccagcaaggggagatatttcatagtggggcatagtaataatataagaagagtgtattagtctgttttcacactgctagaaagaactacttgagactgggcaatttaggaagaaaagaggtttcattgactcacattctgaaggctcaacaggaagcrtgactgggaggcstcaggaaacttacaatcatggtggaaggcaaagaggaaacaggcagcttcttcacatggtggcaggagggagcaaagggggaagtgccacacactttcaaacaaccagatcttctgagaactcactcacaatcaagagaacagcttgggggaagtccacccccataatccaatcacctctcaccaggcccctccaccaatatgtgaggattacaatttgagatgagatttaggtggggacacagagccaaaccatatcaaagagactgagtaaagcaaaggtgaattagagatttattttaaatgtagtggaataccaagtttatgtaaagcagaaagtttaacagtggtatggctattatttggtgaactgattatcattcttttttgcataataggttgtgagtacccgtggcccaatggtatcttaattcttcatttgaaattctaaaggtttgcatttcatttttgttaagcatgttgcattactctaaaacagattttaaaagaaagatactgaaatataattccatatagttactgagtcattgactttttcagaactcttttaggtaatcacccttatttatagatgggaaacattcagctgcagaattaaatgatttgctcaaaaggaaacaggaataaatggcagaatcaaccacctaatactttggatttttggaaagtattaaaaataaacaaatcagaacaacaaagttctccatttctttgtttgtggagtattctcccctctggccccagcaaaagaaaaagttagaaaggagatcctctggaagttaaaccaatgtgtttaaggttaaaccctgcctcatgtcacttgtacaatttacacaacattcatttccttaagtgctaccataattttgtgaatgttaacataaagaagtccaggaggccaccaaattgttcccattggcttttttgtgtagtgtaggataatgaggcaatttttgctttgtctatatatattttgtgtattacttgattttatgatcatatattgtttgtgtgactttacctttaaagtcaatagaattataaatttaatttggtatttacaacacacatatrcacacacatatgtatatattttttcatcaaacattaggcaaatgatggttacatgaaacatgaaactctgggactacttctgtttcacaggttcagatcctgtgtcctgacttttggttgagaaaatataggctcagttaatgtattcagttgtgtgcttttacccaattttccattatctcctatttcatcttccaccaaagtaacttcagacaagaaaagtgtgtttgaagactaccacgggttaactgcctgtattccattataaaatctttgtatatcgtgttagtctttggttttgtggtcaggatcgactataatgaattctggttcttgatttaccaaatgtgagaacttggccgatttatctaatctttgggtaaattagtctccccatgtgtaaattaggaatgagaaaacttaacctttagggttgttgtgagaactaaaagagctccagtttgtccagtgcttggttttatagggactagatacaggtagatttctttcttcttcatttgatttaaatccaacactcactcttactgttgtcccaggtaaaattttaaaaattcattttgctataagtcagacatgattttcagcactctgatttaaaaagtaatgtgatttcttgtggaataactaaaataaggacccaatgacagttgtttccacattaaagttgggtggatttcacctaaagcttctgaattgccagacaagcttcactttatcaaggagaaaaattaaaatccactaaaccaaagtaaaatgaactaaaattccagaagctaaaggacaagtaaaggacacagtcttcacactctgggcttttcttttggtgttctttccattgactgtgggataaaatttgggggaaattgtgagggtgtgaatggcaagtgtatgtttgggttctaagacttgggtcattaataccaagtcataatgtatatttttctatcccctttcttactcagtattgttcattttttagtgttattcagtattttcagtatcatgatttgtagaaatktttataataatgacataattataccataatttcttttactattttccttatattgggaatatacaccatttgcagttattcagtgacactttaaagtagcagtgtgatggacattcatttacataaatcactatccacatccttgattttttttcttttgaaatgattcctagaaatagaatcactcttaaggagtgtgaacgttttaaaagaytcttgatatagtgtgacatttttttccctgggaaaggtgtaccaatttacactcctaccagcagtgtttttcacatcatgtgcttgtcattatctattagcatcaatgatatatgaaaatgttaakgtttcataatttacatttacttgcttaccagtgaagttgagtgttatgtcttatgtttactagagaagacaggcacactggaatgctccttcttttcagcaagtacatatttagacactttgtgttccagtggtagtttttctcatttatttgaatatatgtcaataagcaaaatcttggctaaaaataatcaccttagcactaaatttagtcaagtgtcaaaggcattttaaagwgactaaatttgggatgcatctcagaaaaacatactgcatgatactatgctaatgagattttctttttatgctgggcaactggtaattttgttgttcaccctgagttccccaacaatgttgaactagcaattttcaaacctgtaaacatttgcttttgtartcaaaattgaaagatacaattgaaaggaaagatttagttcacaaactgtataatcttctgattctgcagaattgaaatgaataaacttgaacacatatttaagaactcaagctctagtcagcatataacttaagagggaaaaggttgaatttcctttcaaaataagcaccgtgcatgaccatgcttcctargaaaaaaagaaaaggtaatatctctaaaaattgtatcatcattattttcataccagttaccatggttcaattagtccctctctatccagtctagtggtacatttttctaaattgtgaaaattcaataataattacatatatagtaatatgtatttatataatattatataatatgtaaaataataattatagtttatataaatgtgtgttttaagtggtcttattatgtatgatatttcaaggtgtaagcttatttttcaggatattgtgttttggtacctaggaggatcagctttgaatcatttctagttacatatttctaatttgggggaaaatcagtttttataggaataaaatgtggtccaagtctttagcagagtgaaggataagactgaattataaaaagagaggtttaataaagtattttttaagccttagaggaagttaataaaataattttattgaattccatcatgactcatcttctaatattaattttgtaaataggaaaaaggtaattaaattactaaagcaccttcattttaaaggttaactttattattattgctcataggaaagtttattttttaccacttttagaacactaggtctttttaaattgatgcacaattcatttgggtgctttctatgacacgcagtcagacttgcctccttcctgtgtgggctctgactatctaataaaagagataatgtaatgacttacatatctagaacacaaggtaatgattccattaccaggcatatccctgttctgatttgcagacagtttaatttttacatctgatctttaactagtgcttcagatgaagcagaactgggtatttgaaaggaatttaatttgttttgcccattttaatggtagttttttctgagtgtatttaaagagctttttataactaccatcttccaatttttaaaatggaaatatattttctattgcttatttttttttactgcaaagccttatttgtttattttagaaaaattagaaaatactgcaaagaaaaaagaaaaatgaaaaaataatatattcttagagaattctcattaacatgttggcagatactccagtttattctatataattcctatatacaataggggatcaaagtacttgttacactgaataccatactctgacattacatattttgtaaatgttgttatatgtttttgattgagcaaccagtaatcatgttagcctgaagacaaactttgcatagttcaaagagtgtttgccaactcttttttaaaaaggaggtttcacataaaaatccagatgtccaccttctcttgatagatggggattctgtgctgctggggctcagaatcctggttggccacagttgagagcagatggccacagttggccttagccagccagagcatgcactctgcattcagcgcattcctgccctggtctccttcacatcttgatgtgcctacctgactcccaaagccagctgtttgaagggtagtagtttgtctagggtagtgcttttcaatgaggctgtactggcccctaagggaagactggaaagtgttttctggatgccgcaatgcttggagagcactactggcatttagtggactgcagtcctgttaygtgagaggactggacccggaagttgtgtcctgcattttcaacaatccctttgggtagtcatataggtgaaacacctgtttataattatttgagcctggaaacaaaactggttgcacatataaaaattgctttaattcaattttagtatacgttgaatttcctaagactacagctactgtataatttcaggtaaaattgttctttgctttggaaggtttactgtgcattgttcaccatttggaaaaccatgttgctgacaacaaggtggctcatggtrtttgaataaccaacacagtgcagctccatcagtgctcatttgtagcacccttgttcaatacaacaaaaagcaaaattaacactcctttaacattttttatgaataagaaataaatatcagatcttatgagagaatattaattcttctttgtgtgttctttacttttaccatctataatttgccttggcatgttatctagacttcagttactcttattttccttttatcacttgcctgtaagcctgctttattgtttcttattctaatactaaattttagcctaatgtccatgtaaccactcaaccctccagtctttcactttcttactcttcttgaaaaagtactggctgcttattacttctctttaattcatatttacttgttggtagtagggcaggcatcagatgacttcctcaatatgtaagttatgttcatgcctggagcactttatgattaaaaagaatattatgtatagaggttgtttgtataaactatgagctttgtgttaggttagtaaaagcggcattacaaaatacttgtttttaaaagtgaagctttstgcttgagcagcttaatgctctaggtgaccatcgagaatatacattggtcctaaagaggcttacaggcttctagaaagacattacatagaaataagttatgcctagactgagaggatgatgaaatatgctccaggwtttcagagaggggcaagtaggtgtgtttgaatggatgaggaaggcctgtggatgaagccgaggaggtgccaccaaacctagatgcttggggaagctgttaagakttttggagaaggggacaatgaagcaaagttctctccctttctttttcacttccccctcttctttttcttctagaactgtgtcttttcttctttctttcctgaagatgcaaaagccacagatgtaagtgagagggactaaagccagagtcatgactatgaagtattgatttcaggtgtttgttctcaccttaaactcagaccaaatataaaaatatgaccttgggggcttagaattgtgcagtttttrttcttcargagaaactaytggagagatctcagagcaaggcattgcttgtatttcccttcagtgtagtacttagattttcattttcttagatctaattataaaagagacttaggaggtggaaaataaattcaataagtcttcaaagtttttcctttctttattttataagctaagtatcactgmattgggggtatactaagaagggtatcaatgacagaattgctagtttcctcarcctgcctcagcttaccaaatttaactstttttgtgaaactattaccacatgtaaatatattttaaaaattagaatttctttgaagaaacattttcctagccaatcaaaagcaagagctagtgaggcttcaggatgatttggttttcagactttttttttctaatgccacaatccttagatatggtgggaaaggcacttcaaagtgagtactccagatttaattcaaatgcacccatttaagtagctcagaaaattgcatcatctagggttctggagtgacagtgttttatatgttgaaatcttttggagtgggattgaaacagcaaaatcattttatttcattaaaatcggtctcagcctcttctttttcctctcattcamcgcaggcctttccatctaagaaacaattcatagctgcttcttcagaggatgtctaattttccctcattcagagggacacatttggtactttgccctgtgttttaattagtaagcttcagagaaagaaagtcgtcagagccagggcccccagttgtggaagtttctatatccggtaaattggatccattccagggcagaatcatttatcaacaaatgaaacaccagccacttcccacacgtcctctgattgcattaaaaaatcactccccttcctacccaaattgagtatacttagagtatggagctgacaaacattctctttccttctcctcctcctcctcctcattctgttgaattgctggtttctgtagtctattaggcttcttattaatagtaataaaatgttcattcattaactctctcatgcctgcataccagctatagtaactgtctttgcccccaagttatgcagtctttataaagtcgttcagtagcagggcaatgagttgggaaaactgatattgcatctgtagcatcaggtactatttaaccagtgggagggactgataaaattagcaagttgactaaccacttcccttccttgtggctctttaatattataacggatacagaaaagttcagaaggactgagctagtttgcgaaaccacagcacactttggcaaagagggaatgcacaacaaaacgggtaagtttctttattttaatcttttaagagaactgtgaaaaagatagtggggtagatgtttttaagtctgactctgcaaatcgtctttaataacttgtaggctgtggaaagataaacttgtcatgcggagggaagcaaaaggttttccaatcagtaacagtagcaacaacaacaacaaaaattacattgagcaaaaaattcaactctgagaatgcctttattatttcagatagacaagactaaagtattttggggagagggttcttgaattaggaaaaatattgatgaataagttcctgtactctgattttttgaaatttagcccggaattgtcagcaggggcattatctactgaagctgaatgtccgcctagatcctgaaacagcttagtcttctgttgtcttctttgtggttgaaaatgtttgttgcttttaactcyttgattatcaaaaatttcaaacacaagcaaaaatagagtgaatagtatagagatttcccatgcatctatcacatagcttcaacagctatgacttcagagcccaggttgtgtaatccacacctctgtggtacactccctccttcaatctagttgaattgcagcattttgaaatatgcctattgtgaacattaaataaaagaggcctaaagtttcctaaaggctcataccagctcagcaatataaagtttagagaaatattattacataaaattgaattatgagtcatagaaagcacaagtgagtttccactggttgttttaccagtgggagcaggagtagaggatagtagatattaagactgtagtctctggagccaaactgtttggggtcaaatttggttctrtcacaatccagtatccttaagaaaatttcttaacctttctgtgtctcagtttcctcacctaaaaatgaatacaatagcactgatctcctgagcatgagggatgatgaaccagtgcatgcsaagactcagaaaattgctgggaacatagagtgctcactgtttgttagccctacaactgttggtcaaaattattagagtgatggtagggttgtgatttgtccaagcagaaagccaaaggttgtatctgagcatattgggctgtcttctgaccattgcttttctcctgattattttataatgccaggctaggaaaagtctccattgagatatcttgcttgcttttgcaccctgggaaaactccttgctcttgctttcccccaccagctctgaattaattctctctacaaacaaaagttatctgagsttgtcttgcccaccctctcactttgaggatgagggagtagagattggtctaagctcacagagcaaggagtagatstaatggaaaagaccctgtcatgggcttcatggactcctctaatgtctgtttggaggggcgctgcagttgggtttaggcaacactgttgggccttagaggctgcctcatatctgagctcttatgcatccatctctgatgtagaggtcttccagggctgcaagttgctcagatacttttttcattgctaatgagaatggtgaaattctgaggatggcaacaaatggatggtgaggaccttccctaagctattttttttctatactatagtaatggctgtcatttattgagcatttacaatgcacctggcactgtgctatgtggttttcttatttaatcctccctatatccctatataatacttaatattaatatcttcattttatagaaaaggaaactaaggtgcagagaagctaagctacttacccagctcataagrgacagccaggattttgttccaagtctgtctgacttcttagagcgtttgtccacaagaaataggtttgttcaaacatgtgcactcgaaatgcatccgtggttttgctcttaggcttcctgaagatgaaagtcgtcagtattcctataaagcaagctgaatggaaaaccttttctctagtaatagttttcccacagtgtattttcagaatgcctaattacaagctggaaatttgtcataaattttgacaaatacagaggcgggtggggatggtgtggagttaccgctgtaaaaagtaaatattgaactgacaggtaaaaaaaaagaaatgctcttttagtaaattaaccatgcttcagtggtggattttgtttttaaggccatttgtctctcttgagtttttgtagaggagggtgaaatatatctaagtcagtttttgaraacatggagtgctgttgtaaaacaaatgataaacattgatgcrctgcagaaataaaaattggctgaatcttctgggaggtgctgaagagaactgggacatgcacagtcagacattttagaaacctggaattgacttgaagtgctttatcttttacattacgggtacaactgcaaaaatagaactgaatgtgtgaatgaagagagaggttaatttcacaactttggagttttttttcccctccaatagagtaatggtgttttaaatttttttttttcttcactcaaggggacatggtctaaaatttagagctaaaaatgcaaacatcagacataaatgattgacttgccttttatcaggcaatctgatacaatttgcaatcgttcatttttccttcgttggctacagtacttttgtcatcttgacagaatcagccaagctttacctataaaaatattggaagagatttgaaatcatatgatctttttgcagaaaaagaaaaggataaagggaattgcwgctgccagtgttggggggagtgaagtgggaagggtcactgttatgtcacattcttagattctttttttttttattatactttaagtttaagggtacatgtgcacaacgtgcaggtttgttatatatggaacccatcattctcagcaaactatcgcaaggacaaaaaaccaaacaccgcatattctcactgataggtgggaattgaacaatgagaacacatggacacaggaaggggaacatcacacaccgggcattcttagattcttaaacctttgagaaagcagagcagctctttagtactggccactgcaaaccatcttccagaattgttccatcatcttggtttttttctttttctttttgtctctaatgtcttcatctcataagaacatattcacaacctgtaaagcatggtttagggtcggaaatttctgtatttgtctgtcattagagacagattcagagtgccatttagcttgtcagtgtccacttctttgtgcagtaatgtaatttctggtggggttggtcacccacgggattactgcgtactagtgccttcatgtttacagattgttttctatcctgatctttaacatttgtcaatgcattatgtcactgctattattaaatgtaaamatttaataagttttaaaaatcaataaacattagtgcttgatttaaatgcttgatttaattattaacttaataatcaatttaaattttaataataaaatgtattaaaagtcttgaatagataaagcattgttttcccttgagatgaattctgtcttcatttgttcttttgtccatttattcacaattgcytagcatctcctgctggagatccagaaatcaataatcacagtttgtgccctcagaaaattcacaggtttggggtgaaaaagagttgtatgaaataagtgatgctatagttcacaaaatatattctaactacattgtactgtctacattgggagagagggtgtgtgtgtatggataatcccagaccctgggattagagaatcatggttcaaagcccattaccctctggttttgggtatttaactaatgttcttattccgtggtttcttcacctgtaaaatgatactgagctgctaggggtgttgtattaatttaacatgtgatacatgttaagtatttatatagcgtatcctatagtctttgggggatcaaggatagtttctcaaatgaagttaactttaaacaacctgaatggcatagatgcttctagtcacagggaactggatatgacaaaatggaaaatagttttgcctctttgagaaagagagtaaaggtcagcatggctgaaacatgtaaaaagtgggraagttgcttagaggtactggcagaatccagatcgtgctgggcctagtaggtcatgttatgcagctgcatgttgtgcaagtgcaatcagaagtgattgaaaggtttacacggggagttgcatgacctgaataatatttttaaactagttgcagagtggagaatagattcgtgaagagcaagagtagacacatggaaataggttagaaaactatttcaatagcttagtccaaaaatgatggccacttggattaaacagtgtcaggggtgtaggggcagtggacagagtgagaaatactgtataattaataggacttggtaaacaattggatgtcattggggagcatcaattatgatcctatggtgtttagcaactgggtctagtgagacgtcttgtgtgaagatgggcaaattggaaaaagcaggcttggacttctcaatttacatgcttttgaaacattcaagggaagatgtcaagtaggcataagatgtcatgtagatgttaactgaagccatggaaatagatgtgatcactcagagagatgggatgaagtgagaaaagctgagggcccagtacttaaccactggaaattccaaaatttagaagacagaggagaagcagccagtaaaggaggtggataagtcatggtcagagaaaagggaaaacaagaaagttgtagtttttaaggaaaacaaaagaaaatagcatattcaggagaaaggagtgattatccatgtcaaatgctaaggagctaataaataatcaaaaaataccatggaattggtatcatggagctcattgacataaagtaaacaggcagaaaatataatttctttaaaattgcattgcattttaacatactgactaatcrgttttactgttgactaattgaataaatatatgaagacartaaaagagacatattattttcccaagtggcagtatatttagaaattatcttacttctatctttacataactgtatggtatacaaggaagcagtaataaactatgctggtctaaacttacttccttggaagtgcaaaagtacttgaaatcagcactttcttcttgtgtattcccaatatcaagattaccaggtaccattgctgagggaaccatttgcgtagaccagtagttctcaaccgggggcagtttggtaccccagagcacatttggcaatgtctagagatatttttgattattacagctggcagcaggtaatgtagggggcagcatctagggggaagaggccagggatgctgctgaatatcctataatgcaccagacaaccccccacaacaaagaattatttggccccaaatgtcaatggctgagaaaccttgacatagactaatgcagacctgctcagtgccttggcaatagtagatcttcactagaatttttctgcaggagagtgggagatcctttactgcctttttttcatggtctaccagtaggtttgtrtagtaagtgatctttgaatttggtttttatcttgaaacttctttgtaaaaaacaacgtgaataaataaaagtattgtgtactcacgtgaattacctctgcagaattttcaatagaatttatttatgtggttaaaaatagaggacagtgctccacccagtgcatgttagacttcttacagcagaactggcttccttatgcaaagttagttcctatgctgaagtgcattttagagaagtttcagtattaaaacatactttaaacatttaatagattaattttcttwaaacctgtaaagatctacgtctttaaaaataataaattttattttctcttgattataacataattcatatagctcatatttgtgtgtgtgtgtgtgtgtaactataataaactcttagatacctataactaacgcaggatatggaatttaaccattatcaataaaacctcctttgtgaattcccctcttggccaaggagaaacacaattctaaatattttgtttcttgtttccttgtgttaaaattctactacatatgtatgtatccccaaacgaagtatgaaattagtttttaaaatgtctatgcctgtaggatggattggmaaggagagccatggaaaaaataaaacaaactcaatggctatttgaraaatgcagacacatggctttgaggcttggcaccaagcgcgggggcagtggcaccattagaaagaagtagacatttctgtgactgtctgcctctgtggagaaagggggagcctaaggtcaagatgacagtggtttaaacacagtgttagaatggaggttttatgaacagaatcacagaaggaggcaggggacaagaagcacacaggctgagacagactttgtatgcggtgccttctttcaggaagattgaagtgccatgtttattgtctagacttgtacttgccatggaagcaggacatctgagagcttgctctgtctgggcaattcaagatagagacttagagacgtcattgttgagcagtagagctggaggtgaagatttgagaaacttccgtgtaggtacgagttgaagccacatgaaaggaagaaacctggggacaaaaagcttagggaatgcccatagctaatggtggtatttaaaacacattataagcttttgctrtggcttttgcttatttttatttaaaaacttttttatttaaaaaacttttaattaaaaactgttttatgtccacgtataggcttcctcgggctgtctttacaatatatgttatggtagrggattattaggctggcacaaaagtaattgtggtttttgccattaaacggagtggaccaaagaattttgcaccaattctttggtccatgtgtctgcatttctcagatagctgttgagtttgttttatttttctgactgctctccttgccaatccatcctacaggcatagacatttaaaaactcaaatttcataccttgtttggggatacataaatacatagtggaattttaacaacatgttaaatgtttgaatgctacaataacattctaaactaggttagattcttgtgacagtaaataggatgttatggtttggcttggaattcttgtaagacttggcacagtttttagtcctgatccaaaggagtttagtcatcagaagaaccaccagtggcacagtaaatgtcagtgctaggtaaaaatgtgacatcaacaaagtttgtttctagggctgccattctcctttttgttagtttctttggtcctacatttcttcatcttcacaataagaagttggtctggataatgtgtcaaatcattgcaaaaatgttctatgctttttwgccttaatgacgttccatcctgcctaaggcctgtgcctgggggatttcactctgccctttcttctctcacaggccatttaaatgttacagcyctaaattcgtttttctcagagtcctgctacttactaatgctaatgtgtcaartctgtattatttccagtaattcacaatacactatgattggcctaatatattcactcccagatggcttcttcactgggggtttcactgcctgaacctaaagtggtgctcaatggtagcatggcagaggtaagctaaacagggtgatattgttattatttattttcacaagtacttttctgatccatatttatctaacctttataaacataacattagaaatgtaagacctacatttttatgtttttyttttttttttttattatactttaagttttagggtacatgtgcacattgtgcaggttagttacatatgtgtacatgtgccatgctggtgcgctayacccagtaactcgtcatctagcattaggtatatcttccaatgctatccctccccgctccccaccccaccacagtccccagagtgtgatattccccttcctgtgtccatgtgatctcattgttcaattcccacctatgagtgagaatatgcggtgtttggttttttgttcttatgatagtttactgagaatgatgatttccaatttcatccatgtccctacaaaggacatgaactcatcaattcttacttgagataattttcaaaagtttttactttccagtcaatgaactttctttgtttagcttgtatttgaattgactgttcttaagtcaatttttatgtgacartgttgctacataggacactcttagtcatatagctatagctgtgagttggtttaaatatcccatataaaaagttataaaaacaaatagtaaagctgttattatgaatttacctataggaaaactgaaattttattaaaagtttcatatcagcattttgtgattttgtaacaacaccgtgaacgaaaacccagtaagtaggagggaaagtgttctgtatttatagttaggattgtatctgttagattcaaaatgatgagttagattttaaacttattttggagcccaactattcttgagtttccaaatgaataaagatatttatataataaaaattcagtttattgttgaaaaatgaattaagatgacagtaaataacctcaggtgtaggactctgcattgtaaagtggtacatttaatgtttatgcaagagtaagatttttttaaaaatttattttaaaaagtgattagcaccttggctgtacaactcttaagatttttttttttttttttgcaacactgcataaaatttgaagtattttttgcttcaaaatttgacctacttagaaaagttctgataattccaacgtaatatattccttgttttgtaagcgcctttgggtaatgtattggagagacaagtaatctcatcaagaagcgtaatggaccctatcacatttcaagatatattttttttcctagcacttctgcttcaaatttagtctgtgtttaatgataccacactttactggcgagggtacttttccagcagtttaactctctttgcatacaaatggtgttttgggtctggctgccattactgatcttttccttgaaatgaggtgacataatttgattttttacagtcaggaaaaaaaggtttagttcaccttgagaggttagagaaagaaaggttatcattgaatgaaatgcatggcttgatgccatttgtaaaacaggttggtgctggctcaagaaggcaggaacaaattctaacttggttgaaaagtatgattggcggaggggtaaaggaaaatctccagaattagtcattcaggggctctgcaatgtagatctgaagcagtgcggagaaaaggctaccaatccaccttcatcttagcaagcaagcactgttcctcttcttgattccagggagctacgtattttagtcaaagatgttaaattttgaaggcttctcaagagactgtcatgacaagcaagatattctttattatctccttttgttaatgaagcagttgaggtcctaagagacattaagtgactttcccaggaactcagataccaccaccctaaaattcaggtcttcctccccttacagcagcctctctctagatcaagcttgtccaacctgtggcctgcgggccatgtgcagcccagggtggctttgaatgcagcccaacacaaatttgtaaactttcctaaaacattatgagatttttttgcaaattttttttttttttttagctcatcggctatcattagtgttagtgcattttatgtgtggcccaagacagttcttccagtccgtggcccagagaagccaaaagattggacgctcctgctctagatatactgacttttccaaggaatgacaggggttaagatccgtttttaattggttccactcctggtggaaggctttcttctatrcatgtcaggttttctttgacttatcaataccttcatgaagaaacaatgaagtgaaggacattttaaaagcaggttgtataagccactaaaaaattttgaataatgcctagtctctgcatataagtaaaaaaaaaaagcagtttaacaatatgttaattatatgtagacattatttttatcacaataaaattragacatactacaagaacagattgacttagtttttcagtttgcaattatcttcccagttaaatataagtaaagatcttaataaatgtaacattaaagttcttgaactatataccacacaccattccacataaacagaccggttatattaaaactagcaaagccgtattttgtctgtgcttgctagaaaataaattttgcatatattctagaagacaargatgattttgtatatgtaattgacaaaaaatacttctaggaaaaatataattattgtattaaaggttatgaaatggcagttgaaacccctaaagtcatggattctagttaatacagtataataagggagagctcacactattcctcatgaatcatgctgagaaaactcctgtcaaataaagaattattaagttgagttaaagaaattaatttgtttcttcaaaactgaagttaagaaatgcaaacatttttttctctggatgaaaacactgtttttttttcccgcaatgcaattttataaataaaaggtttattgcaaatgtattttgatgaccttattatactcattttgtgtgaaattatttaaaaaataatattccctcaagttaaattgctcaattgaaacttctcgcttctcaatataagcatcagaataatactttaaggtcataatatcagaagctattgactaagtgatttaaagatagaatgtctgtattctcagatggagcaaattaatttaaatatggtagttgaagttgcattttatgatagagcaggacattgttgtcgtgttttttaaccttaacctgaaaataattagaggaaaaagcaatctagatacattatagatttttttttattgcataaagtgatttaatcctctgttttattccagagacttatttaggtttcatttactgtcccactgggatagtagatagcataatactttctttcttattactatctaagtatttaaatgcagaaatggagatgaaaactttgactcctrctgcatttgaatgtatgaatttacatatataaaaatgtacaataagcatgtgtatagaaaaaatcagttatattttttgtagctcttgctacagagaccaagagatcaaaataaatctgccctcaaatgagaagtgccagcttcttcgcttcccatttctcccaccagacactcatgtttaataatgagaatgaatgaatgatgcagtggataaaggtctgtcttgttaattagatgttctcagataatgaagtcttaatacacctgtgttttctatattccctctaaatcaccatagaattcaagaaaatggatcttgtataaatcttcagatctatttatttttgtgcatatgcatttgaccaagtaatttatttaaatgatttaaatgttcaatgactctactgcttttgaagtcatatgtgtggttcttaaaaatttaaaatactcaggtgttaagaacagcagccttaccatcagttggtgatttccttaagtgaaaattgaagagtttaagggtgcaagtcatacagcaattaagtagaaaatgtacatgtgattaataataattccagtctacttgtttgtttgcactcttgggtcagtgctagtaatcttacacacttaattgacacttgtgacatatgcccatatgcttagttctctaattgtggttctgaaggggacttacttggcatatgtagtttatatgcatcatctcagtcagaaaatgggaaggaatccagatgatgatacgaagtatgcaatgttatcctttggtgaagacattgttattgtgtatggtgtggctggatatgagggttgaggtgtcaaagaagggcgttagtcttggagccaggaagatctggatttttacataagcatattattagctacctcagtgatatttgcaaactaactttacctttccaagtctcagtttcttcatccataatgccttctttgtgaggtggtagtaaactaaaaggaaaaaatttatgtaaagtttgaacctactttctagaagacgtgaacaaattgactttgccttcatttgtttcagtttcttcatctaaatgtctagtctgtaaggcagtagkaattgtatgatgaagtcattctgtaaagctagaaacaaaccttctagaaggcatagacagtgtctagtctatagtacagtgtttggggcctagggagtgctcagtagtcatttgagtgactttaggcacttaggatactgacagatattaaacaaatattatttctgtgatcttctttttccagagttctttaactggttgaattactagttaacaatagttaatcatctcagttaagtaactttttccttcaggtcttattttgtacatatataatatataatataaagtgttgtttgtcaattgtttttttttatgacttttcctaaaaacatgattttactggatgcagtagcataaagaagccattaaaatattgatagtttttcatagaaagggtagaacaccagttaatataaagattaagtgtatagtaaattcaccccacctgtattatggtcaagtcactagcataaagctattaagttttcagagatggcaaatgggtagttatggaataagactcttttttttttgagacggagtcttgctctgtcgcccaggcaggagtttagtggcgcgatctcggctcactgcaagctccgcctcccgggttcctgcctcagccttccgagtggctgggactacaggcacccaccgccacgcccagccaatttgtgtgtgtgtgtgtgtgtgtgtgtgtgtgtgtgtgtttagtagagatggggtttcaccgtgttagccaggatggtctcgatatcctgaccttgtgatctgcccacctcgggctcccaaagtgctgggattaaaggcktgaaccaccgcgcccggccggaatgagactcttacatttacgttgaaaagcataggtgctggagtccatggtaagattattagctgactaccaaatttcattccttctttttccatggaaacagtgcctaagcaygtggctggccagctaggcactatgacttccagttcccatttgagataggtgtggccatgtggctgagttcttatgaatagaatgtgagtgatttggcaatttgtgtcacttctggatctgtgctttaagatgttagttaggctccatgttccttccccgttctgctggctggaacctcacatggttttggtccagtgtcaaccttctgctgtagcagtgttctagaaatgtcagggcagcaaggtggaaagaaccttggttgctgaggtcctgccaacctgaagtgttacacaagaaagaaacttctctgttgtttacaacactgtattaattggtttctttkttacagcagcttagtataaaccctgcttgatagagagtcccatagaatttcgttgacctgggctctgcccagcattagcaaagtgttttgaatcyccaagccccaggttcctcctgtgttacatggtactattgtgagattatactatataagagtttaaaagttcagcatttaaatataccagggactgtactaagtgccttctatacactgtcatttaatgttcatgactaagttatgaactagaaattatctggattttatggatgggagctttgaggaatgatgagtgtaaattactttcccaaaggtytagagctggtactgatagagccaggtttttaaaaagctcagactaccagacttcagagctcatactctcaagcaataccagtagctcttagcaaagtctttggaaaatattaagcattccataagtgctaatagtattattaattcttagcaarcatcatggagcccctgttataggtaaagtaatgtgggttgtgttttggggaccctcaggctatttagcaggggacacagatgtatagaaaagtcatcagagtacatgtactgcatgaaagttgaaaaaaagtaggttctctttgacaaaaaagtaatagagatcagtgaatctcagaaactagatcacctaccatgcaatcacaaaatatgccatattctacactgttgatattaaattaatatttaaggtccatacatcactttttaatgggggcagagtgcgtaagccatttttacgtattccaagacttaagaatatgtcttgtgatttctctaagagaaattctccagcagatcagaaggatagaaccctcagtggaaaatgtatgaaaatgatccatgctgccctggacgttcacatatgcccccacccccacctctgctgtccccaactagtgaatccttcctaacacatccagatgccrtggtccctgattttattggaatagggtaaaaagtttaagaactggaaattctaaattgtgtttctttataggataagaaatcagttttttgctcacacactcttccttcagggcaggaagaccttctctgacccaccaatctgggtagcacctttccctcctggttattctcttttccagaattctgtatatttcctccatagcccactttttataattgtaatgtttgtgtttgtttttactggcacactgtgtatctttttccatcttcactcttgatgataagtgccacaatagcaaaaatcgtataccctccaccaaccagtgcatgtagatatcctaggccggtgcctgacacatagcaggttctcaataaacagtcatcaaatatgaaaatacatgaataatattaggtttgagtaaaagaaaaagaaatattgttagtttccccactttctcgactaattctgaaaaaggaaaatgaaaacatgttctggaatagtttgcttccactgaagctagaaatccacattcacatttgctggtcctttcaccttcttccactgtaccaacccatatgtgtccaaagaaacataactcaaagctaaataaagcatgactccccttttatcatcaggttttctggtctgtaagtcaaccagagaagtagtaatctagaactgtttgaatgacacatagttctgttgtacccttgtagagcacacaaagaaacaaagtttctgatctctgggcaggggtctaatagatgagaagacaagacatatgcatagcacaccatgtaatatagagtgagtaaagagtgcaggcagtaattgcttaagggtttaggaaaggaacttggtacagtggcctgggctgataaggtgaacttggaatgggttggtgaagggaagtacttcccaggttttgagggactaactggaacgaggaaggtaacctgagccaagatgagtgagctagaacaccaagatgtattttagtttgaatttattccygccctcagcaattcactccccagtcctgagacatggaatgaagtgtaagttgtttatttgggaggagatcccaggaaactccaataggggaaatgaggcagggaatggaaggcagccaaaaaacaatatgttatcaagtaagttggtgtgctaggtaactaaagcttaattctgctggggaactctggaaatctctgtacaacaggcacacagggtgaggagctggggtatttcaataccaactcctgaacatcgttattagttgggggctgctgtgggtaggactcagactatgggtggggatgttaattcctcagcacttctggccactgaaaaatacatccaatcgttacagttagaagtcaatgtctggccagtgtgtactgcagtcgcaaaagcaaggagatatgggtggactgttgatagcatctgctatgatgtgttttcagaagtaaatctgagttttacccatgctccagaaatatgtttacatggttttgaagtagcagcctttgtaggaaagaaaagatgatagtaatctaagtttaattaagactgagtaatataggggtagtttggaattgaccaatagattctgaagccttctacacatacttttggtctctctccaartggtgctaytcgtgctgctggtaattacttttcttcaacgccttttgatccaggcattttcttgcttacgatctttggatggatattcatgctggcaggattaagtcttaactcctcagactttaagatttctacagttatttcaactgtttttcaagcttcatcaatattgctgaatataaattcttcactccaaccagacttatttactcacactcctttttgcttgtgctattttggatttgcgaaacaccccccacttacttaaattctttccattctccatgtctgtttccaaactccctcatgcagccatctcccctggtcatctgagccagcaggctgagatctcacttctctcgtggacctcattccacagttaacattgtgacatgtattctatctrttaatgtgaagttaattttttcttatgttattaaatttattgtgtgtttatatcttggcccttcagctacaggagggcagttcttgtgtgtgtgtgtgtgtgtgtgtgtgtgtgtgtktgtgtttgtataggaggaggcaagagtatcttttttaaagccatacctctcaagttcaaatcctggcttcctcatttatgagctttgagtccgtgggcaagtarttgacacctcaacaaccatgaacatttatacctgttaatccatgagtacaaagggagggcacataaatgaaagttctgacgtgtattagaaaggttctgaatatgagaatcatcttgaacacattgaattttgtgaaaataatggtaattgttcaagaccattataaaaaaattcatttcccccaaagttcttgttaccatgtcattttcacaaataaagtgcttgctctttcttagattctaaaactagtttctaacattataaaatcaaaattattgcctggtgccatggctcacgcttgcattcccagcactttgggagtgtgaggcgggcagatcacctgaggtcaggagttgtgggccaggctgaccaacatggtgaaaccctgcctctattaaaaatacaaaaattakccaggtatggtggtacatacatgtagccccagctactcgggaggctgagacaggagaatcccttgagcccaggaggcagaggttgcagtgagccaaaattgtgccgctgcactccagcctgggtgacagagtgagactctgtcccaaattttttttaaattgtaaaattgaaaaaaatcgtaattattattaaagtcatagtaatattttaaaaacaattatcacacattaacaaaacagccgatgtcactaacaccaaaggtcagggtgtggaatatatgcaccaatggttctccatctgactagatatactttccaggaaatgaaaatacttggaagcttttcaaaaagttctagaagaaaaaccatttctgatmcctacaaatatacatgtatatgaaagtgttacaaatataaaaatacatgttttcaaactcaaatgtaattttaagaactttgccttaatttatattgccaagtagcttaaacattttaatagtgtcactgactgatgttgattgttaaagacttcatccaatttacgaagttggttttagcaatctatatgaactaggttaattaaaatgtgaaatttgcaaaaccaagcctacgtagaatacttttaaacatcagaagaaaataaatcactgttgtagccttgtttctttcatagttatataaatttgcttaaccatatacaagaaaagaacttttcttttgaggaaaaggtacactcgaactctgatctgtaattatttaagctttgggcasttcatagcctaatcatcatttgctgtaaatataccatactccctttcaaaatgatatttaatctgcatttagtacgtggtattggattttacatttcttaaagatatataaaagttttggtrtaytcagtaggtgattgaagatgtgctacttcatggagaaaaatatattaggtgtgtctgacctggaaagaatgttctattaatctttttcttgtgtcagatttataacaaaaagaagtggaaactatattaagcaaggatataagttacatatatatatatrtgtgtacrtgtgtatatrtatctgtaggatatgaaaagatgttagccattatattttctcttattcttgctgttctctaatttaaactcaaattctggggattcgtatgagtttttatgggtaaatactaagacaggaagatagggtttgttgaatgatcccttcttcagatccactttatgatgcaggctttacctgtgtgcatagatgtagaaacaggtccagaaacaccagggaacctgaacaaagtcacatggctggtgagaggagaattcgtgtcaactccaattcctttggagaatatatgcaaattatctgcttgtgtttgtggagatctctaagtcaatccatattacccacatttcaatgcataattgtgagtttactgagactttgaccagaagtattgtaaagctgagcttgttctatggcgtttgggaggagttgaaataaatcatttcaaggacartgaaatgttcagcccaaggtacactcgtccttggtttaaacacccatttcctttaaggactttctaatgagaccttgtggattttccaaaawatataccgtgccagtggcagcttattcaccttacttacatagttcgaggaactgcttgtttaaatttagatactgtctctgatgaaatgttttgacaaagtaataccagcttgatactatttaaaatattttgacagatgggaaaattgtttcagtctgagttgagcaatactttattgcagtattttgtgagttagaaaaaaaatggtaaaggtagcctcactgttccccaaaataacatccttccattctccctgaggagagaaaggcctctattcagtcatagattacagtatgtgtgctgagtatgttaagaattcacacwgtttaaacaagagggaacatttggggactgtttccaaacagggaacatttattgttctataagcaaaccgaacctaaagaactttcgggaacatttgttgtggtagcatgttatcagagccttctcatgccgtgatgagattgttctcaattaataaaactaaatcactagattttaaaactgacttggatgaaaaaaaaagctcaaatttacctacttcaatatctagagttttaaaaaatatgctattataataaaaaatatttaaatatttcacattagttgcaaaggatgaaatccaggtggtccttgtttgtgatattaaacaaatgtgttgaagcaatgtggtagggcagtggtcctcaaagtgtgattcctggaccattagaaatgcaaattctaggctttctgrttcagacactggtgcagcccagccatctagatttttaactcgtgttcctgatcattcagatgcacactttagcttgataagtgcccagatagtgtagagactttcaagctatcccaaggcctgccagattggaaagagggaggactgtggtgggggggtggggttggggggaatgatcaggaatggttcccaggcttccccatgtccatttcaactatgggaactttgattttctgttttacgtatcacagagttttatgttgggctctgtgactacacggttttgaaaaacactgggatagatatttctttggaggacgatataccatggcccagaaaatctttagagaataacagcatctctggctgtgttcacatcattttagcaatatgtgtgtcctgaaactgaatttggtcagtaaagtaagagttagcctgtgtgtcagtgacagcctcatgttaaccagtctcctaaggaacacatgtacaaatcagaaatgccagttgtatttttctaattacaatcagaggcataacaaaaaattatgcatacactcacgtttaacttctcctgatactcgcactgtgcacaagttaacatttagagttgggaatatcccaacaatcccttgtccagtgattgaattgtccatgataccaattcaggcctccacctttgatatatacctgcaggtgtgacatagacatcatacagcattgttaacttacagctatagaatcaggggaaagagaagttgacattttctacagatttttatcaacttgtacaaatccattacacacacacacacacacacacacacacacacactctcttactaaattgctgagggccgctaaattcagtgtctttctgaaccatgttatacaaatctactctattatctctttcaaatttctatttctaaaaaaagttatatattattgatggttatttatatagatttttaatatcattaattaaattgtaataagatctttatgttaatgtaactttttgctcacatcaattttatattgatattatttgtttacctctcagttctggagagarrtgatgatgatgatgatgatgatgacaaaaataggttactgtttttataacaaggattctgcagttaacatttagaggtcttacacagtaccaaacagtgttctaagtattttatatttattaatactttttattcacacagcctacttatgacaaaagcctttaaccttttgaacataacccccaatgaaaaaattgagatttggtacatatatacttcctttatgtatatattgtatatgattaggaaaagaaataatgaatcaacttttattatatctaataacttgtgagtttttattcccttccattttattatgtttaatttcakttttaaaagtccagttgagattcagaaaattgatttcattactcacattaatagtcacagcctgcagaataaaaaattgtgctatcagatagataatattattatttatattttacagatgaggaaataggcacagagaggttaggttagttgcccaaatttacataatgagtggcaaatccgcagttcaaacttaggtagtctgtctccaaagccctcgctcatagtactatattctgtcttacctagtcagctccttcatattctactactgtcaaggagggatgaaccaaatggggaatgtttttctcccaaatatggggacaatatagtgacagcctcaamttttctaaatagaaggatttagagatgaaggaatggagactggctgtagactggcgttagagctacttttccatttgaaggcatccttttatttaggatgtgtgtttgttttaggaagtatttgtaaagaggctgatggagattactgtggggggaaatggcttttgccactgaaccaccctcttggcactaccacgggaaatttattttaaacaatctaaagaacagtaggtggaaaagatgtgtacccagattatgtggaccttcctggtgaatgaggagaggacaaagtgattgtagggcctattgtcctgactccttctagggcatacagttagaggtgcaggactgctaccatggctgcatatttttgaacacagacatattctttccctggtgcttttaaatgtgatttaaaaatatgtgtcagatgagcaggcacaaaatgcaaagataggagagccatacagtgaaaaatctatttctccatcttttccttggttgtctctcttttctctctctttcctagaaacaatcactgttgtctctttcttgtgtagccttccagaatgctrtgctgtgtgtgtctgtgtgagtatctgtagtaaacattaaaatattactacacattttctgtgccttgaatttattcctcttattttatgtttcagattttgttccacatgtggaagtgccttgtgcctcctttttcactgctacatagtagttcattgtgtgggttttccaaaattaatttaacagatcctctgttagaagacattaggtaatttataatctcttgcaagcctgattattttaaatttaaattacacctagggttctgagtcctctatatggtcttttattcttagcagaagcttcacaactctctgggtcttcagcagggactgataaagatcaaattgttgaattaggtcaggtttgtgtcaggaagttgcttgatctcagttttcttagatggctatttttagcttgtgaacagtaatcatggtaagaaatctttgtatcttgccctagacaatcttctcttggaaaattaaagtggccccctttaaaagatttaagaaatgcaatttgctaacagtttaatgggtttattagggactttgagggtatatttctagaaggagaaatatttttgtttctctgaaagttctagctactttattctccatagcccttaaaaacttttcagatttgtcttcctataattcgtagagatttggaaaattagacataaggcacctgttttcttaaatgcatggttacctattcctttgtcctatcctttcaagacaattctgggaacagtttgttcagctttacgaagaaaacatttcttcatcacctgagttttcggtcacccatgaattctaagaatattttagctgatttcagggaaaaagtattcaatattagtgattgataattatatgaaaaatagaccagtaaagcaatcaagtggaaacttggtagaaatgtatagataagtgacctggtccattctgcatttttctgattcaattatatccacagtaactcagagataacaaaattggtgctatgtagcaaataatctgaagaaaataatgctataaattctttcagaagtgatttcagaatttaatattttcctgtcaggagatttatgacctgacactgagaattattaaggctcagatccaaatacttagttcattttctcttgctcagcatttagtaaagatgtggaacacactagtcagatactggttagtcaagctcggaattcaggatttcatatccttgtcaccatgtgtgaactttggaatatttggattttaatatatgcaaatgcttttataatgtgtgatgtgttaggtgaaaattattgcacacactaacaatttaatttaaaatgctactcttgaatattttataaaccactggaataataacatagccttaatgaatataaaactgtttcttcttcctttgttaaatcatgtgggctgcattctacttaatacactgcctcaatttatccttttgtgctaagattttaagttaaaatagaaaataaacaataaatcaagttggactgcaatcatgttcacttgggaaatttcacttagagacatttgatatatttttggagggatttcagggatctacattggttaagttgaatctgtaatttggttatacataaaattaaagttaatctaagtggacagaatcaatactcttgtgagtttaattagatggccagcttccaagcaagagattattctttttactatcctcctatcctctttccttaggcagcaaaataattcctttgccaaagtatgttggacagttccctggtgacaagttctatagaaactcatagctatgctgttagcaatgtgagacagaagggagggatatgtgggtgaggaggccattgtattctagagatagtaataagcctgccttatctccagatcatagcccagccaaagggatagtgtcccatttgcagaggatctgcagtcactgtttctaaaccaaacctataaaacaggatggtgtttctttcaggctgaaaaatcccaagacagaaaaacaggaaaagtcggggagataaattataaattagactggacttgcagtgtgagaatcctgctattaatagttacgtttgatatgagatgcctggaaatgtggcagtaaattggagtgaggttttatttcaggtaataactttccttttatctctgttggtgcrttggcaagaaaatctagaagagttttaggaggactggatgctataaccttcattgttcttatatgttcagtgtcatacgcaggcttttacttattgaagagtaagttatttacagtgttttaagagtgagattttattctagctccgtgaaacaaaacaactgggttgagttgtcatggttgatattacagaaattatttgatgagtagatgcatttttagcaataaatttaaaataggtttagtaatatttaagctacatgattgtatttctaactttgtggctgtcttttaaataaatgaagtttgaaattcgtgttttatatttcagatttttattcttcatgttgcaccatcacaaataaatatgtgttaagtagttaatatgagcaaggaacagtgagaaataaagatcagtaagaaaggttctgtcttcaatggttcgcagcaacgtggttgaaaaaccttggcaagagtacatgaactaaataatattaaccacacacaggttgtgatctgattgtaggtattaggcagagtatcagaacagaatgcatttctgtaatcctcatgttaaagaaaatggattcttttctttttataagactaatgatgactaatataagactaataagaataaaccaacttttattgttctgtttcctataccttattgtaaaattaatatttattgagcacttagtaggggtcaggcattcactgttctgtgtttaccatatgtatgaattcctttagtccttaacatctcatgaggtgggcatgttatgatcgtccctttagaatatataaaggaactgaggcacagcgtggctcattagctgctcaaggycacagagctcataacttatgaaaccaggctggtaaaacaagctgcaggacttgtgagtcaacactcttaacctctgtgctttatactttctctcatttcactgcatattagttaacacctctctgctgtaagcctaaatagatgtccaatttgcactaggaaaatacaggctttaggctaggatcagagacttgaaatttrtttctgtagaaaaggatgagttattttgatgtaagtattcacagcactacataatttaagtgattaaattcatccccctttggtgaggttggggggagtttctaggagaatgacaccctcacctttggatgttgagagatgcatatttatggaagtgtgcatttcctctacctgctcagtctaaactgactttcttcctggacagatccttgtgatgatgacttctgtcacagatcacaagagagccagtcacaaactgggtgtctgcactgaagagagtcctttagagactgagtgtctgatggacctgtgtttgcaattgtctttttctatttatgtgacttcggaaagttactactgagttttatttcttcttctccttaaaatggtaatgataaaagtgaaaatacctagctcatagggtggttgtgagaatgaaatctgaaaacatctataagcaccctagctgcataagagctataccagtttttctcaaaatgttaagtacctgtgaagtcatctggagatctttttaaaatgcagacactgattcattttatttagttgatctagggtgaggcctgagattttgcatttctaacaagctctgaaatgatactgtgctggttcaagggccacactttgagtcacaaggtcctgcacaatatgcatagaagaaatgttcctattaataggagctgttaaagtttgtattaacagaatatttctgttgataactttgcactcagtttggggttgtctgctgaaatatgtacatataatgtataagtattgagaaatatggcatttagaatcttttcattgggaaataatgcattctataatggttttgtgctgcattgtgacaaaaaataaatttggagtcctctttggaataagattccattaaaaattcacccatgttgccaggtacggtggctcatacccataatctccgtacttgggaggccaaggcacatggattgcttgagcccaggagtctgagaccagcctgggcaacatggcgaaaccagatctctccaaaaaaaaaaaaaaaaaaaaattggctgggtgtcatggcgcacacccagctactcaggtggtgtattctcagctactcaggaagctgaagcaggaggatcgcttgagcccaggagttggaggttgtggcgagccaagattgtgccattgtattccagcctgggtgacagagcaagcctctgtctcaaaaataaaaaataagaaaataaatccagcactttgggaggccgaggcaggcagatcacgaggtcaggagatcgagaccatcctggctaacacagtgaaactctgtgtctactaaaaatacaaaaaaattagttgggaatggtggcgggcgcctgtagtcccagctaataggcaggctgaggcaggagaatggcgtgaacccgggaggcagagcttgcagtgagccgagatggcgccactgcattctagcctgggcgacagagtcagactctgtctcaaaataaataaataaataaataaataaataaataaataaataaataaatggcgccactgcactccagcctgggtgacagagtgagactctgtctcaaaataaataaataaattaattaaattaaaataaaaattcagccatattaaaagactcatgagtgtagtaatgaatgaaagatgtgattgagtaactttgtatcatatgtttatttctagcagccagattttcttgactaaagctataattagtcatggctctctgattattctaaaaagtgaatttattatcttgagggcgttgctcttaatatattttgaataataaaatgctgaaattaagtatgcttgacttgtgtctgataaatttgaatcttaaaacggacttttgaaaatataggaagaaaaactgtataggaatatcccgtcacttgtaatgttgacaaaaatagtagaacctatgactcacgtrtgtatttcccaaacgtgagttgagtaactggctccagttgttactgatggcatgccgtgcttgtgccatatctgtgttctctgataactgctaaatcaactgctgcctaaagtagtgtcaaggcagtgaaaagcctctggccacctgtggaattgtttcgggggatgggactttctactttggggaaaatctgtaaatctatggtgtaaggcaatcctttgtgttttgtttctgttagactacttttgtgttaccaaagtagtctaacagaaatacttagtagtctaacagaaatccgtgttgccaaaagttcttcataaattttattgctctgtcttgcataaatggcctgtatacaggctctttaaaatggttggtaagagtggaaatgggaagagagtcttgccctacttaaactccagaaaatatgataatggttgcctgtaggagctctgactaatcatatattttttgatgacatgtgcttgccatcaaaacagcatcaaagagagaggaaaagaattatatcagagcctggttcatcccagtgtcctggcctcctagggaggtgttagaatgggatggttttttacttgcagctgcaagatacgccagcatctcttggatcagagcccttcgtgaagtaagggagaattacaataggactgtagctcaggccaagggattaatagaaagattaaattttgtatgttttaattcaatacaaaaatgctacataaacatctgcctttttaaaaaatatgaaatcctttccatcttggtgatcagcttgatcagcaaccacacctcacacttactgttttcaataacaaatggaatgcagatggcatttgtttcaacgataactacagacagcaataactaatgaataacttcagtgatacctggagtcacctgtggagatggtgaaaatatttagaactgacaattcctactgcattcatggaaaaagaagtaaagtggagtggggcctcagcatctggatttttaaactgttctattgttgatttgaatcaattcatcatgaattagcaagttgctagtaagtagcattaactactgatgatgatcaattcttttcttgagagacgaaggcagtaaactattacagagaaggtctgtgctttggcttcaaagagacctgggttcatactttgggtctgtcacagaattatgtgaaatacctcttttcctctgtttctttatgtgataaggggggataatactccctatatcatagggtggtggaggttaaatgtaaaaacataacgactagtatagtgcttagtacattacagacttttgctcctcaaagtctcgccctgggatcagcagtatttgtatcacagcagatagatccaagaaatgcagtatctcaggcccattccagacctcctcagtcagaatctgcatttccgggggattcctctgtaacctgtagtgtgacaagcactgatacaaacaaacgttaaatgtttgttagcgtagtagcatttaccgtaattgttgattgcttttacagttctgagctgataatcttaaaaacgccatgatggttgaaacaaaaacacttcgtggtatttattttctggtattttctttttattcatactaactagagtagtttctgttgctggtgaagatttgtttggggttcagtaaaactttcaaaatcgcctttcagatcttaagtatcttttagttatmtccttctttttgtgtttatgcatttaaacataaactataaagccaaaatgcagtttaaaattaggcacaatgtatctacaaataaaagctcatctagcaaccaataaaatggaaacttgcagattcccagccagattttaaaaatcagatcaaatatttggaaactatgttatttgttgacgcctataaatttaaaaataagtcaaacaaatctgctattcttgcaaagcctaaattttatgagttccccatcattattggaatgagaaattgccattgtaaactctgtgctaaatttactttcttttttgacttttaaaactcaccaatatattgcttgtaatttagctctgacaaaaacataaaaaaggctaaatttaagaggcacttctgttgtgttcctcaaaaaaatttttagccatccaactttggaaggtaaagatgtatttgtcatctacagctaggcttaaatattattgaaattattgaaggcttttgaaagtttctttgcagttgtttaaaataacagctttgccattaatggcaggcaatcacaacattcatccagtattttgattttttttttcttggagcacaaactgagtgagaaaagtaattttctttttcacatatagaatctattttagttactctagcaggtttttgttgttgttgatgaccaattttcaggtccaaatgttaaccttaacaattcacraggggtggtgggaactaaagattttttttcactctctagtccaacttacttcagcacctgctagtcactataggcagcctgacttttaacaggctcatcagcaaatccgtggatgaaatgtcttgaggacattcaaccacactgaggggcccagtgatcatcaaggatgcttgcagtagcagcctattaacttccttttatctgcttatgagattaatttgggttgatcagatacttgattgtactgtatttttctcccttcctgtactctgtggttgatttctcattaaatccagtggtgacacctccacaaggcttcgaaatctgtctttaacttccagctaatggaggagcttgctgtgaatagtacaagctcttatttttcaggacagtaataatgactgagggaataaaatcctttgtaccggctctcctgtccaaccttgaaagatgtgttgctgcaggatcggtggctcttcagagtatcccttattgtcaatcacgttaactaatcaccagcagaggactcttgaatttggcaaacttgggatttactctttaaaagtgctgttagctcatggaacttgaaggacctgtcattctttctgctgactcattttttattccttcattgtgctctggtatatgaggaggaagggatctctattttggtagatataattatgtcctttagtgaatttctgagtgagcagataagtctgacatttcctcccactttgtttctctccttggacaccccccaccccagttgtcacaatagtgttgtggaaagagcactgggccgggggtagaccctatttgcttggcccctgctctgcctgtggccagctgtgtgacctcaagcagtcccataaactttttaggagaactttccaattgtccactttccagcacatttatctaagtcayggtttagaggaagagagaagagagagataattaaggaaataactagtattgagaataaaaatatttgtcttaggttgaacatatgcaatcgccatttttgtaggctacgtattttcatagaacttgaccaaataggttcctctatccacacctcaaggcctaaggactctaacatatgtaaggcaagttctatagatgtgtcagaaatttccctactcaagtcagatctggcttgagtccacctagtggaggagatggaaattgttcttagtatttacaactactttttctatctcttcccttacatattattctctctcctccctggttaactccagaccttcagaaccttcatactctttccatcctatccattcatcattagttcatctaccttattcatctccctacttgtttcacatgtgtttttaatacttaccatattccatgtaccacacaagagaaaggaaaaaggtgagctagagaatggtcataaactcaataacaggccattctaaataggtgatatgcctttatgttgctgaagatactccattttaaccacagaatcattttatatgctttttaaaaaaatgtttgtgttattgtggaattacargaataagaaaattacatgggaaagtggttgatttagttcagaaattgtacatattggtgaggtttggaaagactgttcctttatatactgtgcctttttgaagaaggttcaaattcctgtctgattttaggtagcacatgaataattgccttattagcttttcttctctttcctgaactaagccaagttccaatcaaattgtatagtgtgccccagatgagacgcgccctggtgcacaatagaaccatataaatgttgttatccacttcttttaaattggagagctgtaacttttttgtagctttgaatatttcatttagaatttatataaaaagtagggcagaaatcgaaatatttctgctttccattatgtattcgcctcatttttagagagatatttaacatttcaaactagttaaatttattttactcttctttgaggtgagaatgcctttgagatttctagtggaataaatgtaaagctcccatgtcactcggccttctcaggtcctttctctcttatttgaaccatctcctgacaataacatttagaacaatatcatctacatgtaaagcctgtattaaagtaatcccttcttcactatcgatttagcagcattaaacactgttcatctgtaaagctggggcacaatcagaaaattattttttctagtcccatactttaggatatgaatgtgagcatcacaatttgaattacttggcctgtttctttttcataatcacaaactttgggcataagagaaagatttttggatgttgagaaagggatattgagtgtaactgtcatggttctaagctatcacagagtaactaatttttgtggattaccatatcagatatcacagaatccattttacctccaagagtatagttagatacatctttgatttgtcagtgagaataactttcaaggcttacttaatgggaacgtatcattttgatataccgcgtcccttatcttctacttagcaagagattattatttccatattgaaaggatctaattctatagacagacgcagaatgttttttgttkgtttccacctctacagtatgctggtgaggatcatgctgattgccgattggcaggggcatccaaggtggttttcttgttaggtgcacaggagaagaaagcagacagtcatggataatagtaagccgacattcgagaacaggattgaaggcaaagtgtggggtcactgtaggagagagaaaaataacagttagtttcaagatgaagaaagaagcaagaataatgtccccttgggagaaaaatacctccaataagcatatgggaaatgagaaaggattcatgaggggaaaggaggattctgggaagggctgggaagttggcttggggaagaaaaggtgcctggtttagagaagggtgtcaggatggagaaagtatgacagggaaaagaactccattactaaagggtggatgccattttaaataatgtcaacctcaaggatggttggcccacttctggaatgaatagcatcaaaggtttatgwgttatttatcctttcttaaggcctcctcatgttagaaagtagcaaacctactcttctagatgctcaggcccataaccttggagttatctttgaacccgttcagtctcccagactccatatccactgatttccagttctttcttattggctctactagggaaaatatatctagacccacgactatttctcaccacctccattgctacctccctggtccaaagctctattctctctgtcagattattacagtagcctctgacttgttggcccagttcttggcttgggcctttgtttccatatagactattctcaacactttagtggagagtcacacctctcaaagggatacacacctcacccacagtgaaagctccagtcctcactatctctcatgaagcccaaagtcagggcttctcacctgggggcacattagaatcctcaggggatttttatagacatgctgatrtctaggctttaacaaatttgaatccctggaagtggagcctagaggcattgtatcttttaaaagctcccatgtcctaagttttggggatcaacaatgaataagacctagttccaagtcttaagcttttgacacctgaccagggacacccaccctggtaactgtaatagtctttggtgagtaccaagaagaacaaattgctggggaatctcaggaaaagtcaggtgtcttagtctgtttgggctgctgtaacaaaaacaccatagaccacttgactttaacaacatacagttattctcacagttgtggagcttgggaagtcaaagatcaaggtgctgacagattcagagcctaggaaggacctgcttcctggcttatggttgttttgttttttttttttttcactttgtcctcatatgactgaaggggtgagggagttctatgggatcttttttataagagcactaacctcattcataagtctcagctctcattacccaatcagcttccaaaagccccacgtccaaatacaatcacactggggatgaagcttcaacatatgaatgctgggggcacatagacattcaatctatatctccaaaactacacaaagtggaggggagtcaaagaagtggcatttttctggactttgaaggatgaggaaggctttccctgagagaggagagaaagtgcagtcaagatgacctcatttattatggctacaaaatgctagtaggaaccatgctgatgtgattatagaagaagctttcaaattaggcaaaccccggttcaatttcttggcaaattacttcacctcttagtgtctcaattttcctgtctctgaaatggagataatcatagtaccagtctcatagggatgtaagaattatcaactgtctttggcatattgtaggtacttcataatgttaactttctacaatagctaattaggcatttctctcaaagaaaagtaaaggaaatagcttttaaatggcttayggtttttcttgggtgctgtatacccttgctactcacaatgtggtcctcacaccagcacgggcagcagttggcagaaattgcaatgcctcactcagggcccattgcggaactactgaacagaatctgcattctaataagatttatcccccagatgatttgtgtgcacattaaatttgagaagcattattgtagagcataaaaaggtgagcaagaaatagctcttgcctttgtggtgcttagaggtccctttaataactttagcatttacagaaataattataatgcagggtataatgtgataaatgacatgagacgtcctcaccaaatactaaaatacagcagattgttttaagctccagttgaaaatagtataaagttccttttctctctaataaggtatgaaagttcttaaagttataataagcccccttccctttctgccatccttcaattgctgtaaaccatagagcttattgaatatctaagcagagagctacatctgtttatgcacattgggaacaattgaccaacaagtacgagttgaatccgttgcctgaaataaaaggcacaagaagtactaraagttaataaaaaaagacccaatagttttgtctatgagatgaagtagactatctagagaaagatcaaggttaagataagcatgtgaatataaatattagtttccttaatttttgatgctcagcgcttttcaaaagaaaaccctattttttaaatataacagcaatgaataaaacaaaaagaagtcttcaatttccccrgttgacattatgatcaaaatatcaatttaataattatcctccttttaataggactgatttcatcttgtcaagtttaccattacaagttactagaacagccagagtaaagcaatttgagttccatatagtcaccacaatgtaattattatttttgaaattaattttgccrttttctttttgtttaagaaatgaggtcttactgtgttgcccaggctggtatcaaactccagtgatcaagtggtcctcctacctcagcctcccaaacaggtgggattacagacacacaaaattttcaagtttggggatatttaacttcagttcgtggtaaaaatcacatggtctagtgtaatctaagcaaaaaaaaataataaaataagtgtttctrtcactggctgtaaataatggtacagtcatgtgatagaccatatatatgattataatatcatgtttttaaagtaccttttctatgtttaaatacataaatacttatacctgtgtaacagttgcctccagtattcagaacagtaacatgctctacaggtctgtagcctaggaacaataggctataccagatagccaagttataccatctaggtttgtgtaagtgcactctgtgatgtccacatgaagatattgcctgacaatccatttcttagaatgtatctctgttgttaagccacacatcactgtatttaaccaaagtgaacacattctgctgggttttgttcttgatacacgtgtgtaaaattatcacttttcaggtgatacattagaccaatgatattctgacacagcagaaatgaaattattcatagcaaattacatttaatattttctgtttttaataaatgtaaagatctgttattgtcttatttcaagtttcatttttgctggcaaaaggttttggcctttactttcaagaacttaacttaaagtgaaattccctacattcttcaaataaggtatgcttgaataaaagcatctaaaagaaagtgtttttttataaatgacaacatacttaggaatttttacaatttgtttggggcaaaaattgtttgaaagaagtagatgttggataacacatattcagaaatatttatattattttcttggttattttatgctattggagtagatgcttcacttctctataggaattaccaattctcaattcctcttcaccacttatatatttttgattttgtcccaaatagccaaacatgctgccataacttctgagctcagaatgaaggatctgattaggaaaagcaacatgttaacagtgtacatgctccatctataactgtgatgaatgtatactttgkatttatcatcacttttaaattattgagatttttaaaaactctattagtgctagctaagacttgtttactgcatgggctatgttgttttggtgcacatctatctttgtaagctatttctttctagaagctatttctttctaccttttgtacagggtagaaactttgcagaaatccgaggtcttcagagttagaattcaggggagaactgatgatgggtagtctattgatgggttaagtcctgaaggttattcaggtaaacatgaacctttcccctgaataccttattttctgtcatttcatcattatgattttggatgcctcattacatctgtaaaagcaattaagagttgaaggaattctttttttatagttcctgtctgctgatgacccattaatgtccatatagatatattataaaatatttataaatgaatacttacattgatttttatttgagctggttttacatttgacttattatttattggactatttmatttagtaaggaaacacctctttttcatttttaattagtgcatggaaggcttataagattaaaaatagttgtgtttagggaaataagcttatttcttatgatgagcagttacctactatagattatatttaatctggtaactaaaatattattattttttagtttacatatcagaacctagatataatggccagaagatgtaatgctataatatagttaatttgcagtaataatcacattttcagtaaatatttgttagaactatatgaaattgctgataattgatcatttctgacctacagatatgacagctgcatagattcaacctactatgaaaagccaaaacatggaatattacactaattaaacggttacacaacagaacatggaatgtgcgacacttcatcttgggatgcaaatttttgtgctaaaaaaaactgagaaaaacaaaaagaaaaacatgtatttctgaggaacttgtttttatatctggcataaatgagaaaaagctaattaaaactattaattatcagaaaattgaagataaagttgaagagcctataccaaccaaagttgaataaatggcaaaatataatatagatgagttactctgaaataattttttatttcctactatctaacttaccaaacttcctgattttaattacataacaattttttggttattttaatattcatttggtacttatttccttttttattgttatagtattagatgaaatcataacatcaatttgctcctttgtaaaagaggatgttgagttagaagtgttctaaggtggctttcagcaataggctgccataccaattggaaaaatctagcatggtataaaagaatatttaagcagtaattatgactggaaaacatcagagtggaaatgaagtatggctgagaaacctttttgcttttagctttttttggagttcattacaataaaatgaaattatagaaacttaacccatgagtatttttctctttgaactttagttcctattgaaattggagaggaaactacacagtaatctaagggtgatcacaggagatgtcagctgccttccagggctttttgcaacgtggaattgcctttactcgtttattgaagagtgcccgttatgtgttggggctggactcacagtttctagggtgtagatcttagccatggagatccagacacttacggggttaggatattgggagtagwgctcttatgcagggacaggcttgcattaaccaaactcaccagatattagtgtataaccaaaatgcaaatttattggtttacaataagaattctttgcactaagtaatttagaatacacacgtaaacccactctgtgctaactaactgaaagtcactttatagggaaaatcaaattataattagaagatcatgtaatttttatcctcattttgtgaatatggtgttcacatttactgattgcagatattgaaccatcctttcatgtttgggataaatcccacttgatcatggtgaggtgtccttttaatgtgcttttgaattcagtttgstagtattttgttgaggactttttgcatctatgttcatcaggaatattggcctgtagtttatttatttattattcttgtagtgtccttgtccggctctggtatcatggtaatgatggccttgtaaaattagtttggaagtatttcctcctcttcaattttttaatatagtttgagaaggattggtattaggtcttctttaaatgtttggtagaatttgtcagtgaagtcattaggtcctggacttttctttgataggaaatattttattactgaatcagtctccttactcattattgatctgttcagattttctttttcttcctggttcagtcttggtaggttccatgtttgtagttcatttgtttcttctaggttatcctacttgttggtatataatagtttataatagtctcttctgatcctttgtatttttgtggtatcagttgtaacatctcctttttcatttctgattttgtttgggtcttctttttttctttgttagtgtagctaaagttttgttcatttttatcaaagggtacaaaattttagagtggaggaatcagttttaatgtatgtattttatatttcaaaattattggagaatagatttttaacgttctcaccacaaaatatggtaagttggtgagttgataggtatgttaattaacttgatgcatctttctacaatgtataacataaatcaaaataacatattgtactccataaatatacaattattatttgtcagttaaaataaatatgtaaaaattatacttagaaggccactttggtaagtgtcggcttaagagtgaatggaataattgtcgattagtaaacaaaagaaatgtcatctctccaaaaaaaaaaaaaacagygaatggaatgaactgtataattcaatgtttgatgatactggtctctgatattctgtgctctctgattcacaaaagtgatgtgcctgtcaggggatcagattgctcaagaacatgggccagagtrtaattcctgttgatggcacttggatccagattatgtcttttgaagccttctgtttctttcctccatttcacattacactctccttgctgccttttatgcattttatgtaggcttactaacccagctctctagcttagtgcctggcccccagaagtactgaagaaatgtttaactaccgtttrgctagccacaacattcttactagttttgctttgggaatagtgtatattttacttctaaggtactttgggtctattttattgctgcattctaaggcttgtgtgtatgtgtgtgtgtgtgtgtgtgtgtgttccatrtgtgtgagaataatgggaaggtatgatacccacctctcataccttgatgctttgggaaaataaaaattttctgattatattattttgcagatgttctagttatacttatcaatcttttctgcttgccaaatgaagatttagattgtgaagattcttttcagagacataggttcaaaactaaatgaaacccagggcatctgtaattcttcacactttagtgaagctctgtgataatagtgagtagatgtgtggtgtggggacacttggggtggtatttcagacacttagatatttgccggaaatctgaaacttgttagttcacatttagttttcactaaatggattatatttttctcctaaaactgctattccactattaaaattaatggacatacaagataccttgtctgtaaatagaacagatatttttaatattttgtcacagtcccccaaagcattagtctgtaatgttgactaatgggttgaaaagatattaacttcagaaaaaccaaagagaattaatctcttagaatacttctgaaaccaccaacttctgtttttgattttatatttctatacctcaggagggaaaaaaaaaacaaccaaaaactatttcccctctactccctccctgttttctaaaaataagtcacttttggtttgttaccytataacacatgccaaaatttatcccagagtgaatttttgtagccaacktagaaccccaaaatagaaactgctgacagttccttaaatacagtaacactggcaggtgccttggtaataaattcacaagcttagaatctacaaaacaataaagttatgcaaattggagcatgtaggaagaataatctgaaacaaatggcagaacagtaagtttagcattgtggcatcctggttttactaacacaaggcaaataaccctgaggagaatcagggaaattttagatcaaggaggattacacagacatacagtaatacatgaatacaatttgagttgaccaattaataactggtttctctgttatcacaaccataaacagagatgggaaactgatcataggttttgcatttgataggtacarctatcaagaggtaaatggaaaataacaagacacctaacttgaagtgatcacatgtgcagagcctcttagcttttgttttaattgttccttcagcatcattcccatcagtcatattcagattagttgtttaattttagccaatcaggcatgtaatacatttgtgaatttcatttattttaaatgtctttgcctttgcctaattatcttttacttttgttattaatctctgatatggcataatgaaaaatcgtgttttttaatgaaaagaaaagatgtgttcagttaacatattttcaggaaatacatattttcagttaaaattagaatagctctaataatatcagacaaaaatgtagctgaggaatatagcactaccttttattagttgtgtagtaaaatgtaactttttkaccctgtagtatcgcttgcagaatgtaacagaaatgtttaacttttcttgtttttgttttcatcaacctcaagttactcccaaagaagttcaaaatgtatcccagaacttaaagtataataaaaaaattttaaaaaaagragtacaaaatgtctattgtgtacacaggaaaaatatattagaataatgattatcttaagtatactacctaccttattcgaggtgatgaagtagtggactgctacaagtttgttggagagagggactagaactgtccttttaaatgctatattctatatcatagcatttttgtctggcacttrgtagatcctcaatagagattgcttgaaataataaacaatatcacctccaaactcaggttcacaaaatttgagttcagtggcacagtggtgatcacatgtgcrgagcctcttaggaaaaggaggcctagagaagtattgagttagatgctcaggttccagagccaggactggaacacagatactggacttctgtcaagcacaatatacttttcatggcctttgcccgtcattcagatgtttaaatttgcttaaaacagtgccatctattttctttggagttcgaataaaagttctttctaacagagtgagtaattcacacacagatacttaataatttccctgattattttttcatttagagattttcaaactaacaaccaaaatattctggtagaaataaggtaaggttgagaagtaaatattataaactggtctgtttagccagagttcccctaagagccttcctcattccacctcaaagaccattttttagtttttccaagtgtctgtgaattgtggctgtgcatgcgcacatgtgtgtgtgtgtgtgtgtgtgtgtgtgagagagagagagagagagatttttactttaaaaaattctcatcacttaagcttgactgttgcttttcttcttgcatgtagcttttctaaccaaataaattaaaaatacttaaaattgagtatattccgtaattggtccaataaaagaggggatgcattggaagggagctatggcacagggattaaaaaaaatgttttgcacctggctcctctatattaggtgtggaatggcagtcaagccgttgagctgctgtggatttcaattaatgcatttctaaaatactttccagaaattcaagatggtgattatttaaatagttgaaaaatactacatctcaatttggcctatctttttgtgttgaagatagaggatgtaatcttttttcatgttcagtagactgtgagctaatagttttgttaggggctgagaaatcaacatacaccttacggcactggagaagcagaaacctggcttaatttcagaagtgcaggaatctttgacagaaatattctactgtgaggaaataaatttacacaaggatcccttctcagagtatttactaaagtctgaaaagccttaatttattttatgccaaaatttatgtttatgtcatgccaaatatagttgctgatattgttaggtattaatttgtgtgccaaaagatactctttatactgtattctctgatcacartgtaataaagcagaaattagtaagaaaaaacagtaatacaaaataaacaacgatttggaaggaacaagccattaaaaactactgagtcagaggcagtttttaaacagagctcaactagagatagaaatagagaatgttaaaacagtctttaccattggatggggtgaagttggagagaggaaatggggagatttaggccaaagaatacaaaatagcacatgtgttggattactaattaagagatctcatgtrcaacatgaggattaaagttaataaaattgtacagtattagggatttttgttaagtagattttagctgctcttgtcacacacaaatagtaactatgtgagatgatagctatgttcatctgcttcactatatagccattttactatctctctatatcccatgtcatcaggatataaacctcaaatacacaccatgaaatgtgtttttaaaamacttgcaatcataggttatttagaaaatagtaacaccattaagggaataaacaaaatggtgcaccttatgaggtgcagccaaagctgttctcatggcaaatatattagtattaaataatttcactatgaaacaacaaacaacaacaaaaaaccccagcaaatcatttaggwattttttaaggtaaaatttaaacataatctagcaatgttaaggagaatgaggtatgataaaatataaagttaaagaatcagtaaaaagtggagtttatatatgcaagagctggttcttaaaaataataatgacaaatgtctgaaaatatagctaaaaatgttaagtacagttaktttaaaaatgagtaaagaagtttaaatgaaatataaattataataaaaatagaaattataagctaacacactgtgaaacttggtggcaggaaaaaagtcaatgactacttataatttcagagtagaaaaatacagattttgaaaagggaaaaactggagaaatatcatttgaggattacttctcaaaatgtttttaccagttagattttcaaattttcaagagataaattcttatttaatgaatagaagttgctagaaagtattccaatgactgtttttgaaggtctcatactcctgaatctaaaacctgacagaatatcatatcacaaaaaatctacagaccaataatttttatgactttataggcaaaagtgtaagtataaagtagcaaattaaatttagcaatattttaaaataataattcacctgaatcaggaatggcttagagtcaggaattcattaataatcacagaactagatcaaaagaaaaaacatctcaccagagatggataaaaagctattcctgcaggaaaatattaataaactagaaataatataatccttattatgtaagaaaatgtatctcaatctatttcataatttgtcaaatgccagaggcattcttgttacaatcagggcatgttttatattaaagattattggtgatggtcactttttcaaaaatcacgtaacttttccagtgcattaataaaaaacatacgtttatatccattatttccagaaactccactcaaatagtaataagaatttaaattatgaatgcacaggaaaaagaataggaacaaagataattgtaaagaaggaatgttagcaaattttaggaatatatgaagagggtggaggagttagcaccacagaggaagttcaggttcgatgtctataaggagagtgacattgagaagcaagctrttttgctctctgaaactctaatgggtccagagattacaggcggggatgaggttaagggctgagtacataatggtaggttaaaaatgtgtgtaaataacaaatcaccagatcacttctctcccctctttggctcactaccctgcayacttaggagacaacttttctttttgtccggcagggttttagaagttgattattagaagaaattaatccatagattttgagactttcagacacctgaaatatgggaagctgggagtgagggattgaaaagggattaagagaaagtcttcatattgaaagtgagaattgtcaacttacttcccacctgcccaccatctttcagaagattttccaaccctaaggagataaataaaaccttgaaaataggaagaagtgaaaaaatggaamttggaagaaatacatgtaatgcagggcacaggagaaaaattaaaacaatttagcaatagctgcagagagataaaaatactgatctttatgccaccaacaatcttaggtcctaatcttgtggcttcttcagcaggtaggacggtgacccagagatcccatctcatggttcctttttgattgctcattgccatgttccaaggtttcatcaggcccacaatggtcttgatgtacatggattttcttcttatcttagtgcaagtctgggaaggctattagctgtttttcattgctttaacttgcaagagtctatyggagcctgggagagtaaaagggcaagaattagataactttaattttagacatctctaacgagtctgaaaagattaayggggaaagtagatttattctcaggtaaagggtgggggtaaatgctgagctactgtttatccttctaagaatgtttagawtctctttctcatagaaggaagtaaagaaaaaggcaggattattagccctgctatacctggggtggtaccaaaccatcaccttcactggctgtcagcagaactgatgagtgaagaaaggatcatggctgatgcaatggtggggaagtgattttgtatggaaggccaatccataaataatggcaagtgtaagacatgaactagtatatttcaagaagtacttcagtcacacagacattttgtagtttgtctttttatttattttattgctcatgatgtaacattgatgatgtaaatgatataattataaaatatttagtttagagcaatgcttttacattttctcttaagaaaattaagaatttaccttctctagtcagaatggctgagatcaaatttttactcaaatgcttgctagatatcaggtcytggacaagtattttaacctcttgtgcctcagtttttccatttacaagatagaaattaatagcacatagcatatcttgtatcaggtcaaacagatgttattgttaatgttgttgttattattataagcattttggcctagcctcattttaaatccttsatgagatgttgcccagatctggttatccatgtgctatatcctaacctctctctttgtgtcccatgttttcacattcaaccactgacccaaatgcagtccacatacataagcagagttaagcaaacaaggctctgtggaatgaattctgtaatgagaagactgttgatttatactgtcctctctgctgtaaataacatcttcattttaacatatgtacttttcactatgaatatatgtaaaattgtctctatattttaaagaataaaactgatagaaatttggctgcaatcctagccatttgggtgagatttaattattattgctagtttaatctcatgctacatatttcaaaaagtcactctccaagttcaggatatttattataatacttcattatgctaatttcatgttttataagatgacaagctattgtcatgatttattccttgtctatattcttttgaggaagccaattgaacgttaagttcttatggatgtatttctttaaaaagtggtagtgtcataccatgtactgtcattatttaaaactgtgacattctgacagtgtgtcagaaaaaaatggtggctgtgtgaaatttacatgcctaagtttgtaactaaaactaattttgtcaggatatattttataattaccaatttaaagaagcgtataattaaagtaaaatgagctctgcttgtgcctagaaacataatttttaatgcttttgttagattttcttcaattgaattataatatatttaatttatatcagaaacagtgatagagtaagattatttttcaaaaaattgcagtcatttggagaaattcatgaacaacttactatattaattattttcacattaatttagtgacttttaaaagaggaacagcaaatcaaccaactttcaaatgctcccccttcttatacttctgtattttatttatagcagaggaaaacctttcttcctttcttcctgtcagctgtgcagtagcagttctactgaaattggataaagaatctccaaaatatgctttagcactttgagttagcctctgttcaataatttgagtaagatgattatttttctagctaaatcaactacatggtttcatgatataggtctaaaaagcagcttatttttttaacattcctgtataacactttgaaaacatccctcagtaaggggaatttatttttacagagtaactttgtagacatgtaatgaatgttttttacatttggattctaatgttataataatgtgcatttttagttcctgatctcatcttccttgcaagggcacttgctgactccggccagcctgatcatctggtaacagcgtaagacttgcagcgtgtgtatgtgctgaacttcattaccattgagtagaaatatttagtcgccatattaaaaaggtttcattattgaatgtatttgaagtggcccgcttaggaaatgattgggcatgtgccactacattcaaaaaagatggtgcatatttttaaaaccagctatctttctgaaaattgaaggagatgggtaaataacatctatttttgtataaaaattaaataactgtgaatgatggataaatcgcttaacttctttggacttcagttttctcatctgtaaaataaatgtaacattatccttctctggtgagttcaaatagttttaaaaatgagataatgagataatcaatgtgaaaatgctttgaaaagtatagagcactgtgcaactttaaggcattactatttttcactattgttttgatatttaaatctacaacagggttaagtacctttttcctggtaaacaggaatggaaaaataaaattattgtctttaagataattcacatttcagaagtagaaatagaatgtgcacaggctatgaagatacagggtaagttatatataatcaattgaatatgcagtaacaactcaccatgttggcaatgttgcagtgggtggtaaagtaccattgctattcaaagaaatatctgaacagaggaagagaaatgacaacgatgttgcagtgataatgacaacaatacggatataatctctattgaggcacaggtttttgtctctttttccttaatgttttcttagatccaaggattaggctcaaggtacgtagcaggtacttaataaatatttggcagtattacwgagtgaatatcacttactttgacataaacaaaaagtttacacctattttcatgtcatcaagaatgcatttagtatttcctacttctactgaaaagtcatgtagtttttgttatttattctattaatatggcatcttttatttattgattttcagatgataaatcaatcttgcattattgggataaatcctacttggtcaaggtatataatgctttttatatagtgttgtattctatttaaataacaktggtctataattttcttttcttgtaatgtgtccctcagattttggtatcagggtaattctgatcccatataataaattgagaaagagtccttagtctttaatttttatggaagtttacagagaattggcattattattatttttttaaatcctcggtagaattcaacagtcaactccatctgggcctagagcttttcctgtggaaggattttaaattatgaaaccaaatcctttaataaatatcgtgctattcatgctacctatttcttcttgaatttggtagtttgtgttttccaaggaatttgtccatttcatgtaagttttcaaatgtataggcataaagttgttggtaatattctcttattatgctttgagtatatgtagaatctgtagtgacgtcattatttccattcctaatattggtaattagtatcttgcctttttttttctccatgatcagtcaggctacaagtttgtcagtattctggatcttctaaaataatcagcttttgatttcattgattttctctattgtttttctactttctattttactgatttccactctgatcttcattattgcctttcttcaacttcctttgggtttcatgtgcttctctttttctagtttcgtaaagtggaagctgaagcaattggcttaagatctttcttcttttcwactataggcacttaatgctataaattttcccctaagttctattttagcagcaatctgcagattttgatatgttttcattttcattgtttaaaatatttttaaaaaattaaaaaagaatgtactatgtgaagtaatagataygataatttgcatagtagcttcattgtgtatatgtrgttcaaaactttatattgtacaccttacagttatacactaaaacataaaaataacatatttcctattttttaattcttttatctgtagattatttagaaatgctgtatttattttccacatattttaagattttaacatatatgtttctgtaagtgatttctaatttattctactggggattaaaaacataacttctatgacattaattcttttaaatttcttgagatgtgttattgcacacaatgtggtctataagaccacatttataggtaaatattcaatatgcatttgaaaagaatgtgtattatgctgttgagttttctacaagtgctaatgaggtcaagtatgttgatagtggtatttaagtcttgcatattcttactgattttctgtctatgttttctatcagttattgagaaaatagtattgagatttcctactataattgtggatttgtctgtttttccttgccattctgttaatttttgcttcatgtgtttggaaccttttttattaggtgcataaacatttaggattgctatatcctcttgataaattggcccctttaccattatgaaatgatatttatctccaataatattctttgctttgcaaactatatgtcttaaactttcttttgattagtgttagcatagtatatcttttccactccattcacttttaacctatttgagtcatatttataatgagtaccttgaaggctgcatataattggatttttaatccaatctggtaatctccacctttaaattggaatgtttagaccatatacctttagtgtgattattgatatggttaggtttaaatctactattttgctactcatttcctacttgttctgtccgttctttgttccctttttacttttgtacctttttatgggttgattattttgaaaatgattccattgtatctccttttattggcttattgtctacaactcttagttttgttattttagttgttacttcaggatttatagtatacatctttaaattgtaatctatcttcaagtgatattatagcatttcatgtatatcacgggaattttaccaaaagtgtgtttccatttctccctcctattgtgctgtcattgtcatagattttactttatattagttataaatcccatgctgaatttttatgagttttgtttaaacattcaagtatctttagatatttaaataattaaaaatgtttattttttcatatggttaccttctcctgtgccttttattctttgtataaatcaattttcccatttggcatcagtttccttctgcttgaaggacttccttaaacatttgttgaagtccaagtctgctggtgatgaattctttcagtttttgtatgtttgaagaagtcttttccrttttctgtaagatattttggctgggtatagaatcccaagttgacttttttttttcttttagtattttgaaaatgttggctccactatcttcttggttacaatgtttctgacataaaatatctgccatccttatcttttttcttttgtacttaaagtgtgtgttttcccccctgactacttttaagattttcccctacctccatgactcttttggagaaatttgatgataatgtgccttggagtagttttattcatgttttgtgtgtgtgtgtgtgtgtttgtgtgtgcacacacacatgtgcctggtggttgttgagctttttgattctgtggatttatattttccatcaaaatttgaaaatttttttgccagtatttcttcaaattatcttctactctttgggggcttcaaatatatgtaacttaaaatgctcccacatgttgacaattctctcttcttttttaaaaaatttaattctcttttttctgagtgtttcatattttggtagtttctgttgctgtatcttcaggtatgctaatctttttttcctgcgatatctaattggctgttagtctcatccaaagtgttttttatctgacaggttatagtttcatctctagaacttctattttgttctttctaatgtcttttatgccactacttagttttttggacataggggatacagtgacacaactgtttcaatgtgtttttttctattttctcttcaattaattctagggtttctatcagtttttggcctattttgattgattaatttttccttatttggggttatattttcctgctaatttgcatacctggtaattttttattatatgtgaaataatgcaaattttactttcttgggtcttgaaaaattttttgtacttctataaatattcttcagctttatctaaggacagttatttgaaaacagttttatccttttggttccagtcaggcatgactagagtaatgctgtctagggctattacttctcactactcggggaagcctcttcagtttactgtactcagtgtcccgtgatcaaagaggctttcctctcatttctagctttttgtgaccataaagaactattacctttaattctttaggcttattctttccctagcctcatttaatttccttacacacatgtacaggtcagtaccctgctgatttttcaagggaagaacttctgtataggcctggaattctctgtgttgtttggtgcttccctctcctctctgattcttcctcctgtgaacgctttggtgttgtcagactttcagctctgtttcttccactctgtgagtttcctcacttattcttcggtttctgctcactgccccatcactggaaaatctttcaaggcattaaactggaacaatatttggtctcaccttgaaaatttcacatctcacagggattactctcctttgttgcctcatgtccagtgtcttaaaatgtttgcttcaaatattttgtccatttttaattatttcaggtgggatagtaaatctggttcattatgccatcttgacaggaaatggagtttctgactcatagtaatttttatattacaagaaaaatgttttaaatgcttactttttcactttttattaagaaggctaattacctctctgcctcaattccctcatctaaaaattagaattatagttgtgcctactttcggagtggctgataaattttactgatrtaatggtataaatcactgaatagacacattgcaaacacccaataaattacttattttatcactattttatattacaaatcacatgaaacagtctttcatttgtaaatgctgtctgtccacttatattgaattcaatttctatttctattaaacaagctgaatatttgcgttatgtgcaagcaaagagtgaagtggatctactgaatgagagagaagaatcatacatcttgaaagacaggtggtaactgtgaatatagttagttgggtaaaatttcttgggagaaattktattaaggacacttacatggtgctcaaaatgttcctctgagagtgaaattccctatccggagaaaagattcccagtaacaatttgccaagtcatttatttatgacttggatcctctcggtaccctcctgtataaaatctcctgtcaaggaagacacacatttatttccatctttctcagtaaaagttgggctgttaaaccagcagcatgggattttaacatatctctatggtatcttactcatcagttttttttaggcatgtgtcactaaaactacccactggaacacatttcaccgttccctaaggtgaaatgtagaagctacttaacagtaaatactttatgtcttatgaacttttggcaaggaaggtaattagtaacttggtatttaaaatgtccaaggaaatttatgttatataaattcttaacacagttataacatatttgacagagtttaatggaaacaatattaggcatatttcaaatcatcatagaattcagattatctacagaaaatgttgcctrgtgtatggtgtgttcagctctgctgtgtctctacagaatattgagaaagggaagaaggagcgattttttaaactcaaaattaaaacagaaatttaagcatatttttatattaaagaatactttgcttaatgtacatttttaaaaacagcaaaatataaaacatagaaataaatttctaccttggatctaactagagagctcttttgccttctctacttttcttggattcagtaaaaataacaaccatttycgcatagattttatgggtactgaactgcattttctcaagaaaacattattttcttagtaaattcgcctttatatatgtatttacttctaacaaaaagaatcatagtattgttttatcaaaaagtaagcatagatgatatttattttaggatacccactaaagtaatacatagcctagtctagtctagtatagttcagaaatagtttagtaaacccttatttttccaataacccaactgtattgggtcaggaccaagtcatatctgccttctttacaatttcttctgtgttgagcaattcaatagaaatatcactttttagggtcttaatgagtaattgtcttgggggagtggcctttgacagaaaatattcagtttcttagcacatgtaatgtgaaaaattagggtatttcagattataagtaaaagctggaaatgtcttttcaaaaattatttttgttttgcaaatgctatgactagtgtcttgaacccagtagatgaaaatatctaataagatatcagaggtattatttgttgattatgtactatgtggtaggaactagatcaagcactttacggatattatttcaatgacttcttccaacaagcttataaggtattattatcctcatttcacagataaggaaactgaggttgaatggttaagaatattggccaagtagcacagaaagaattctaataatattgtctgatttcacatatagattatgttagtgactgtttcatagcacttatgtttacaaatggcttccagaaattgttcaggtagtattcgtacttaaatagtaaatcaaattaatctaccattctattggtcttaaaatcatttttctttgcatcccaaattaccattgtaaagttttcagggaagatagaatccacatattttcagcctttgttttggcagaaaaaaataggagttaaaaatttgcaatttgttcaaagtgcaaatatgctgtggcattttggcattattccaagggcacagatttaacttggaattttggtggctgttactgggaatgtactgtttatcaaattcagtgttaactgcacagttgaagattttctagcaaaactttctctttttaacactgaaaaaaattcaccaaattctaaggattgataagtaaaatccataaggagctgcagtctttaatgaacaaatcttctattaaaaagtaatcagtcaggtcattccacagagagcttgcataatcgggatttggatgatcttgggctctctactaaaagctcacggcctcacatcttaatggaaataagagaagatgaagtttatagcccttcacttatgtaatgagtgaaataaccagcaagcaaacacctgtcagatggtagtaggtgctcctgagaggtatgacaggtaataatttaatcagatgcattggtaattctatgacctgaaagggatattgtgtttccaaagcccagaattttctttcttctagataatgctgtgtccttgtgtacaaaatgacttaaaatgaaacattagaatgtagaatatattttagcctaaaatgttctttagttcttcattgctttcaggaatttctccctcctttgtgcttctaaattgttaatccatgcagatcatactaagcattatttcctttcatatattagaacaaatatctgattaagaggttattgacattaggaatcacaattctcctagccaaccacacagcgggattcaaagcttgttcatttaatgaattgttgtttagtgaaagtacatgattgtgttctcataagacactttgttccctttattattcaacagaagacaaaaaaaaaaaaaaaactacaaaatttcaaggacaattttttgcccttttagcttattatgctccctggaacatacatagaaagaggtgcatttgtttctcacaggtggatgagaattcattttatcttcttgagccaaggccctgaagaatctgattttcaccttttatttgactgggtgactgattctcttttctttacaagttggtgctgcctataccttcattcagcattttttttccccttttacctgtatttttgggattttactccccctgctggcctctggcatgcattagagttgactcttttccaacgactcctgtttctgtctgtttctcttcaaggagccgcatgtatagtacatttatgttccaaacacagcagaaacgacatgagtttaaaggtaggtattttaagttttcaggaactcatttttctcaattttttctagagagactaaagtagaccaatgctaatttagaaaatatagaaacaacattctgaatttttgaatgctaaatgtaattggtttaattacaratcattttgctaaagaaaagttatgttatggcccataatgaagaaagtttctttctccttcctaggatagcagtaattgtgctgcaaaaaacccaaaatgtttctattttaaaaatgtcttatgaattataaaacctttgaaattgatggcttgatgttgcagataaattgaactagatttcaaagtacagttaacttgacagtgctttgaaacaagggtcactcattgtcattacatctttatgactatttttatgagagaatttggataatttaactctcaaaaattgtcacatgctgttttagcttttgtagttttgcttttgttagatgtcacaaccgctattaacacaacttgcattttttcctttcatttatgttgaactaaaagatatatgtgaatattttctgggaattatttaccttagattgaagaggagagttgcagtttttacattgttcttttgctgtcattaaaagaaaaaaaatcatctgaccaggaaatagtatttttagtaaatatactctcagaatcttctccttcccatctgaaaataagatgtttttgctttttgataaggtaatggtcaatgggatcgaaagacacttttttcttccacaattacaatagacactggtatggtttattgatgattctcatcagttatatttcaccaaaatctcatagcaacaggagaaaatttcccattgtttggttgggagccagaagctgagagtgcaggtcatttttcttcatctgaggaaagtggaatagccaatccaccactttgttttctaggtctaaaatgatctgttcagtctttcctaattcatgggtgtggcattcataggagasgctggyggcacaaaggaaataagacatctatgcatcaatttctttatattgtaccatgggatgggggttttaaaagttgttcatatttgttttctgcaccatactgaatgaatatttcacagtaactctttttagaacacaatacttggtgaaaaataaaattcaccgtattaatgtaacattttccaatcctagttaccagcactgcaaagtacacaccactcaacaattgctagaatatgtagctatgtgtatttttaaagcatattataaattttcccactcttagcagaaagtgaaggaaaatgagcacttcattagcaacactcttagttgtgcagccaagaaataaaacatgaagtaaggtttctagatactatgggaaccccattatgactccctggggaggcttaggggaggatgtttttcataatgagtccatgcagaaagttttaatactagaacatccttacttagacatttgcttagatttctaccactaatgggaaaacaaaactaacaaaaacaacaactcccatgtaaattgtgtttattcctattcagttaaacaaagggatcttagaccaagttgataaactgcaacatgttcttatttattttattttatcttacgttattttattttattttttagacagagtctcastctgttgcccaagctrgaatgcaatctcggctcactgtaacctctgcctcccagattyaagtgattctcctgcttcaggctcccgagtagctggactacaaggtgtatgccaccacgcccggctaattttttgtatttttagtagagatggggttctcaaactcctgacctcagatgatccacccacctcggcctccccaagtgctgggataacaggcacgagccactgcacctggccggcagtatgtttttaatctgtatctcagtgccctctgtttttacaaagtagatgataagtattgagttttgaaatagataaagggttgacagtcatagattcttgcttttaattttaagagagaagtaggtagcaaattttggagttgaaagacggatcatgcagtaactagcaactgtttctcaaaattccctcatcattaggatctcttgaattgctggtttaaaatatcagtttctaggctgctccacaaaatattttgggtcctgcagttggacatgaaaagcacaagcaccccaggtaattcttatgatcaggagaatttgggaaacatttatctgatttaattaattatagaggcaatgtcagcgattaagaggtaagatatggagtatagattcgtatgttcatttaggaaatgcttagctatcaacacttattgagcatttatactatggaccagatttgagcacacttactacatgtgtgatttttgaacttgtcttttaccctttctgaatctcagtttctcatttaaaaaatgaggataataccttactcatggatttttgggaaggttcaattagatatgccccaagaaatgcttaatttttctgaaaaataccactgtttttaggcatctattatactgtaggggtcataatttaattatttctattaggtatttttactatacaccaagatttcattatgcaatcacacatctgttgttctgagctgtggttcttactggcatcttttggagatgtatttagaggtaaagaatcctttaacaacttttaggatccaaaatctcctaacacaaactttctccttctgccttctctttagcccttttaaaattggtgtatttcctacttaaactcacatatttcaacttcttgcaacactattaaaattacagctactatttgttaagcacttactgtaatccaggcacagtcctggatgctgcttgtattatttaatcttcacagtagtagtgcagtttaggtattatgactatttaaatggagtctgagaacacagaactcagtaattgagacagcatcttataggtatgatgctgtgaagaacagaaattattttaatacctgtatatctgtcttcaagcccaagttctgtccactataagctattcccataactttaatacagtcattttcccaatatgagaacatgaatttctcccattggcttcctaatggttttctgtcactcagagtaaaattcagcttctttacttactaaggcctacaaagcactgcaccgtatgtctttcatgttctaaggcttttgcatttgttggtccctgtgcttgaaactgtcttgccttaggtaagctgtgcacctctccctgacctcattagagatgtctttccagatgacctcccatacttgagaacatctacacacacacacacacacacacacacacacacacacacacacacacacacacacagatattgcccttcctccttgctggcttattttttctctatagcagtgatcaacagctaacatcttaacatctaatatagttttctttattttttctttctcccagtataatgttagtgcctgagaatggtagcttaatgttatctgctttatccccactgcctagcacatagcagggatgcaataaatatttgattctcaaacattgaattgggggacatatctgatattctttatgttagtaattttataatttycacagcattagaacttcatatgtgatatcttggtggttaccctaatattgtctttgttaagtatacttttctaaacaaagttcctgacaaaaaaaaaaatgtggtgttgtgttttacttttcacgccaacaggaatagcactatgcagaaaaaatatgtctttctatgtagaatatttagaataaaaggtttttggaaagatcccttactcaaataatgaagtggctattcaatattaatacttagtatatttcagttgttctttgctttggaaattagggctttggaacatatgtgagaattaggtattacttcagtattaggaggtcttctacttgctgacagaatacttcgtttgtgccagttctggccatcattcattattattaatagtagtatataagcatggtaatgctaattcaataggttttccaggttttttctccctcttgttattatcttttattttgaagtttgcctttatttcaagttgtatttgtgggtattcagaattattgtacctgtgtataactcagtggttcaaaagtcattagtctttaataaattagaatttattttaaaaattcaagatctgaaaacatcatttcattgactctcaagtaatgttaatgccaagttttgaaaagcaatttttctttttggaggcagtaattttgagtaattggattccatgaaaaaaatggattcaggagctaattgtgtaccaggtttactggcatttgtgcaaaacaacatttagcaactgtcagtgacaatactcatctaatttctctttatcaccagctggtcaatcacgtatcttcatcaatacaagtattttaatttcctctttcaggtatcctctttgtgtgttttcttccttctcactctcccttctctccttattttaagctactttagaaaatagtaatactttactgatgtgtaagatgcaaatcactttggaagtgagaaggtggatatttatacatttgttctatgacggggtttctaagtctgtcccactgggaatggttagtacattccatagctgtaagggaaaaatccacttttcccagaaataaaggtcaagagacatggaacaactcttttattatttgctttcaaaacagagggaatatgatttatgtcgaatataagcttatgtcatagctgtgcaggtgctgccgtgaagctgtgacccctgtctaatccccataacgacactgggcattgaccacatttgctttgtagttactgagctgctttcccaggggccttctagtttctgaacccagccgctgggtagctggtcgacccgtgcttggtgcaagaacattgttttgtaagtgcaacctgaaatacattttataacccctgcctaagttaaatgactgtaggtctgtgacggagcctctgtgattgaatcaaagtctcctcttaactcctttttttccttcatgaatttagtagtcggctgtaaatagttttttctgctttattttttattgcgttaaacataatcacaatgatttatttcaaaaacactaaacagttgcttgatatttacaagataaaatgtaatactgactttaatacatcattgcctgatttacttatataatttttatttatcgttgtaagatagttaacatttttccatgttgcttcaatatttttccccttaaagattaatgacttggtaaaatttgcagtaatcacacaaaaaatttgttttccaatttcattctgtcttccaacattttgatctcccagagttttaatattttttaagtttcctatgtgttatgaattgtaaaataaaacaaaaatcccccaaaacaaaaaaagacagctatattaaaagtatcaactttattttaaatcttattaatgctttttataatgggagggaagatatatatatttaaatgaccatktaaagcaaagtgaggaagttaggaaccaggacgctgaagctaaactgaagttgaatctcagctctatcatgtcccagctctgtgattttgttaatctctcaaaatctgcctcatctgtaaaaaaaggtgaatgatagtaaaactatctgttgcatagctgttgtgattattaaatgagttagcatttgcaaagccctacataaatatttgctgtgtagataatgtttaattttgtcaagaacttttaaaagatgtgttttgagtcattcatacaggcacacacacaggttattacaattttatcaagaaattattagccttgtcttaaatctcaaaaaatttgaattgacggtgaatatgtggaaagtgacaatayacaaggttatccactattggaaggtgtgtgtggaacagaacagaactagatcacatagctgtggagaacaaaagctcaagaagaaaaaaattcaaaatgagtttatatttttctcacaataactgtgggcacccttcaagcttcagttaagtgatgacaacataattagacagtaaaatattctgtttctgaactgttctttgtgtgaccttcagttatctctgaggatcctcaggtttcttaaggtttccttaggctgtctgtttaatctgatttttctgaaaaatgtacatgaataaataggccctccaacyaaaaatattaatatttaacatttagccaaagaggtagcaaatattattttcaaacaaaatgaagtaagatagaagagctgagacaatataatattctgcttagagggaaacagtaggttgccactgatttttagtcctgtgttttgaaaactatttgagatagaaggactaaaattgcaatgaagattactgcaacacagttacttggtcctcctatcattaattgattaaaggtaattgccagggagtcacctctggagggcagtgcagtcttatatttgttgcaggagctccaggtacctttaaattttccagaagttcatttcaaagattcttggccttgtgagatgtgagtcattccccgttttaaatactcaaagggaacgtaaaggtgaaaacaaactctttttcgttatgatggttagcatgctagattcagggaaaatgaygggaaataggacttaccatatagagttagtgaatctcggtgtgcaaataaggagctggctgatgtttgtttttttccccccttttccccactttggttcagatacttgtgaacctccatttcatgatccttgtttttgtctctgtcttactctaaaatacaaatctgtatcttctaagaaaatcttttaacagcctcaccatatagggtgttgcagaaggtcrgctcggcggccagcaaaatatcttccagtaccttaacaaatcagcaaaatattttgagaaatgctttacttttatgaacaaataccctgctagttattggatttgtcatagcatctaaggtttctctcataaccatactgaccttcatgtgctattgtattacaaaaccaactctttatgtaatcaaacctaaggaagaatgcttaattagctatacatgaccctgtgttatgatacaggcatacaaaagttattttcttcagcactatctagctattgtacaaagaaacttctttataaagtaagacatgggatatttgatgtctcaggagtaaagtaatattgggatttttttttttcctctgcaagctgtttgagagctttcagcagggggataccrtatttaaaggtagcctaagatctcataactccatgtgtcacaaaaactgtgtaggttatgaaagacttttctcgtgagcaaaacaactgtgctttttagctctaaatcatgacatagtcttgttataccacaaagaattaaagaatgttaagtaaatgactttcttccctccctctgtgcctctgaggatagttattaatgccgattcttgctgctgagtgatcctgaagctactgtggcaacctttttattccctgagtgcaaatgaatcctctatgaggtaattgaaggaaattgatgacattatttgctgtatcttgggtatcaacagcatataaatgaaaaacacagcagaatgcctggcctgtgttaccacattgacctacacatttggatctgaaagatctcgagctattttctgcctaagcagactttgcacctttgtgttttatagtgaagtagcaggtacacaactttttaaaatcatgaactcctagcattggattaccaccacctggtgtaagggataggttttatagaaacacaaagagcatggacttattcttttcatttttgttcttctttgccaattttaatgttatcttcacaatctgaacagtgtgacctgtttcaccttcttttattttgaatgttagtgtatgcacattctaagccaagggtggctttaccctttaagttaaattaaaccatttgggacttagcaaattctgggttgtatgttttaaggtgaaaaaaaagcactaaaaagaaaatttaaaagaaattttatcatcatatagggtgtggatgaatgattcaaatagaaaacctattttaaatcagccctactgaatgaactatactaaaaggacatttatttacctagttagggaaaaaagtcactttaaatatggtctctagttacttttcttcccatttattacatttgccacttcattgtgaccttactatgaccttgtagtttatgggctaaaggtaaccattatgcaataatgaaaatatgcaggccagtctttaccaccttgaaaaaattggtttcttatattttgtttaaattaacacactttgctatttataaagctctgctctacggtgcttgaaagaggagagaagaattaatcgcaactaatgtgcagatttaggcttttagagactgtgtttagtggaggtgagtcagcaggccttgttatattaattatagtggtttgattctctactggttttgattcacagagatatgcgctgtacgtaagaattaaagcatcaattgcttaggagaaaaaggaacttaaaaatcaaaccattaatacctatctttgctttcttcttttgtctaatttgttttattttagttatccaggcccagatttcctccactttccctttgccttgatcccaaaacctgacctctgtgaaaaaggcaattcatcaattggatgcggtgagggaaatgcccttcagaaggatctaaaacaggcaatacaaaaagctttagacagtcaacacatcggggcacgtaagctctgatgtgacttgttatctctgagaccagtgtttgcattcttcctggtttgttccttaggcttggaaatgcactgaaaccacagctggtcttgaagagccatagaggatgtgatacaaggaatgataaattaataattacagatcctcaatctgcttattgtcagtcattttttctaccaccagttacaaatccagtctttattctcaaacagaagtgatgataattatccttggtaaaataactttcacataatgttgattgcagacagtcaccaagggctatgctccaagtacacttctcaccatttttatacatgaaataaaaactcttattatctccacttgtccatgaggaaaccaatgtacagagaaattaagtacccttctcagggttacacagaaattcaagagctggatttttaccacaaaggatggtttagagcctctggtcttaaccttccaagagtctgggttcttgggaatcttcattttcaacataggctctttatactaccagaactagcatgttcttcagatattcaaaacggagacttttaataagttcattattaaagaagtgaataatttaggattaaaaaaattctgttaaaaatgggttgctcataattaatgaaggcagatatttaaaccatgaatcctttataaaaccttgggatgtgaaagcttattttgaaatggactgttggactgcatgctaaaagtatacccagagtgaattttcagagacattagagacaaatttaacatcaccctcaaatctgtggaaggttaaatatacagagtgtgagacattgagaattaggcatttacaggtacttttccccagagtttggtttggtgagggatttaacccccatttcgtgacactgatcaaggcaggacattttgaaggaaaagcactacaaaaaggaggaattgccttgtcatgttatgaagcatttaattctaaacttctctgttttaaaaacaaaagaggcctatctatagataaacaaagtagactcgtgatttccaagggctggggcaggaatgggtgggtattagccataaactggctagagggatcttactgcaagcgattgaaatgttccaaaattggattatagtgatcattgtacaatctggtttaaatgaactttgaaatcattgaattgtaccctttaaatgaccaaatttatggtatctaaatataccttagtaaagtcatttttaaaaatgcatgtaaaaaaactaaaaaagaaaaaaaggaagatccagaattgggtcttcagacagaatcattatttgcatcaaattcagaatttcccgtacatgatattaatttacttctctaatttgaagtatgacactaaatgtaacacgttaggtcatacatttggcaaagacaaattyttcctgcctgtactttttcctttcagtttttaataggtggcgccattattctttgtagcctytagagggcagcacataggtttttttttttttttttttttttttttttttaaagacaacaaacttgtaactcccaagcatcaagaatgcccagttgtttcagatgaactctccaattttagttcatcctgacgacctcacagtggaggaccttcctatagtgactcctgcgaatgaatcctcccttccttcctgttagttgctccctttcacctctggctatttaatgtccttgaaagatctttcagctctctctacaggggaacataggagtaatttcagttgaaactttcacaacctttttcctttagagagcttgatttttaggtaaagacaatagtcagttaatgaataaaaccggtatttgcacatgggggagggttgatgcccaggagattgtcataagaattcctgacacaagttcttcagatcgcatcggaagaatccggctatgccaaaagataaatgtagagttctcctcaatgtatgaataactagggatgcaggatttaaaatctataagaatttttaaagttgtaagacataagcatcctggtgtgttttttgattgttgttcttttcatttaattatttattattagtttatgtacagtagaagccaacaaataagggttggaaaggtaaattaactagcattaaggtatatactgaaagtcattttaagaaatgccttacctcttctcatccccacgattaatggcattttccctatgatcattgaattttaaaaatacctggaaatttataccattctaggatcttatagaatcttataggatttattggagttgattttagtgtaggagcctgaaacagttttaggtccccctcactatgtcttattgttacttcgtttctgacattcttcctatatatccaatctaatatatatgtgaaaaagggtagacatcaatcagtattaagaaacaatgagaaatgcctgaacagacctttaagctgtgatttaaaaaaatcgtatttrggtgatcctagcagttaaattgactttttctttccttctgtcgtctctgttctccttttttttcctcagtaaactttgattgcttgctaattgtgtgctaggccttgtttggttgtttattgagagaaagaaataaaggagaagggagagaacacaaayacaatttctgcccttgtggaattatagccagtataggagacagacaaaacagtatataaacaaaaaataacaatacataattacagattgaaatcaattctaagaaaaaaaaggtcagtaagtatatataacctttggggccaactttaggctagagagttaggaaagaatttctgaggaggtgaacttaggtggccctaccacataaaggattgggcaaagggttatccaggcagaggaacagagtatgagaaggccctgagtcaggaaggagcatggcttgttgcagaaactgaactagtgtctcagtgtttcactgtgaatcaagaagtaagctaggatgtggcttggggaggtaactggccaggactgaaagatctttgtgaggagcttggatttgtttctaggttgagtgatgcctccagagggcaaaagaaaaacagcaacattatctgattttgcttttgataggattattctggtttctctatggagattggattggagaggggctcatatgaatgtggcagaagtttagaaggtgtagctgggtgtggtggtgggcacctgtaatcccagctactcgggaggctgacgcaggagcatcacttgaaccccggaggcagaggttgcagtgagctgagatggtgccatgcattccagcctgggcaacagagagatactccatctcaaaaacaaagcaaaacaaaacaacaacaaagaagtttagaaggtggttgtgatctagacaaaaatgctcttgcaactgagtttcacctgcaatttaggaatgggaagtaatgtgttgagtccactgatgttgggagcacaaacacttatgtaggaggtagaagaaacagttttttttcctataaagttataaatagcttttagcttattaggtgtggctatgttgagacagtagttaatgattagtgggatatttaaaagtgattttggaaacatgaatatcttgtgatttttattttatgcaaactggcattgattttaaaagctgaggcaatttaagcaacttcgaatgagtgttttctctctgagggttggaatttggaaaaaattgaaatatgggagcagatgagaacatgaagaacttgataagtatacctacatatcctttgatatcattgttaggaacttatcttttaatcgaatgcatggtgccataggttattccttctctatatcacttagtacttaagaacacaaaactagacattagtagaatttacagatacacatttgattcctggctttaccacttactctagctataactttagacacctgtcccctcactgatatttctgaactggaaaattgaggtataataaccacgttagaagaatgtggtgaggattatgtgaaaaaatttatgcaaagtacctgtcacatagtcagtagtattcaattaataccagattaggtgatttgccatgatttgcccaaggacaacagctaataaatcgtaggactaatatttcaacccagaaggccttatgctaaaacctgcactgttcatcactgcccagtacttctttcttaaattggggcagtgaggccgggcacagtggctcacgcctgtaatcccagcactttgggaggctgagacaggcagattacatgatgtcaggagttcaatatcggcccagacaacatggcaaaaccccatctctactagaaatacaaaaggtagccgggcgtggtggtgcacacccagcaacttgggaggctgaggcaggagaatcacttgaacctgggaggcagaggttgcagtgagccaatatcgcaccattgcactccagcccgggcaacggagtgagactctgtctaaaataaaataaaataaattaaatagtaaattgtggcagtgaagggacaaggagggaaggatatttgctgttgtcccaaactatcttcttacttcttttcttccactaacctgcttttcctcaactctcattcacattttctaaaacttgagaatgaaaaattcaaaattgcataaaagtagagcaaatagtacaatgaacttgcatgtaactgtagtccccagcacctgctttgtgtctccagggacccagcaaggttgctttggtgattttttttgttgagatggaatctcattctgtcacccaggctggagtgcagtggcacactctcagctcactgtaacctctgcctcatgagttcaagcaattctcctgcctcagcctcccgagtagctgggaccacaggcacgcaccaccgtgcccagctaacttttgtatttttagtagagacagggtttcaccatgttgggcagggtagtcttgaactcctgacctcaggtgatccgcccacctcggcctcccaaagtgctgagaatacaggtgtgagccaccgtgcctggccacttcggtgattttctaaccacactgaagggcattttcttaaccctcattttcctctgcagttagggctcctgctgacaccaccttctgctctgccttagcattgccacaggacacggttacctcaccttccaccctccgattctcctctctaaacccctcacttcttgctcttctgctcttcttgttctagattgttttcagaaagtttttatggtttcttggactcaactataattgtaattaagagattaatctccagtcctaacctcttatcctatgtatattcctacattttcaattacttttaaacatttatggcaaaactcatatctgccaccaagtggatggacttcctttgtgccatcatttttctagtttacataagtgaaatkttcaagtttttcctctgtactgtcgtactccttcagtcatttagacccaatgtcctttggtaatatttttcagtatcttctccttattttattttcctttttctagaaacatgcatcaaccttatgacttgttatcctcattttaatcttttcccctacactttctgaacatctctttagccataaatttccagaggcctctccatttgctgtggaaaaaaaggagaatttaagaattaccgtttcaagtgcttttcctctcactgttactttaataaattcttttcatctttcaaggtccacttcaatctcatctcctttttgaagatttccatattctttcctcaaagagtaatatattcctttcatttagttactacagcactcttggcaccactcatttcaaaattattatgtagtacattgctgacaattttttttatttgtcttgttataccagtaaaaatgtttactttccaagagttgacatttttttatacttacttactttcagtgtctagagcatttgtttatacataatagttgaatgattgattttcatactagacaaataatgatcaatgggtaaattaattagcagtaagttatatacctgaaaattatttaaagaaatggcagaataattacccttgtctgggatcagttttgtaacatgccacagttaaggggcaaattttcagttcattaagcttcttccaaaagagcctagtttcagaatggaatggtgtttctcctcttctgagaattataagaaagtgctttagctagcaaattttttttttcctcccaggtggttctttgtctacataccatccaactatgaacaataatgtattttatagactatactaagatattgaaagttggagagatgtattcctttgtctgatcaaacctagcaaggagaaaaactgggttttcttctcctaaaatattaaattccaaaaattacaggtactcattaaaaatctcaaacaatacataagtaagtgaaagtaaatggtgatgaaagcctcttatccacccacacctctctcctgaagttacctagaccactgctttcagttcatttcaaacatctaatctattgcatgtcgatttatttgggtagtattcactgccttccctaccccttctttaccactgcacctcaagaagacctgaaaacctttaaattgaaatttaattatttcaatttaaacattcttattctgtatatttggtaaataattatattcacttatattacaccagggaaaccaaaggaaacattcatttctctttctttagaaacattttaactgactcaataggcataaaattttactgagggttagatttctgttgaatatatggttaattctacttctgtttaaggaaaagaccttaactttaattcatagagcaatgctgttgcaaatgtgtaattttccaaattgtccatagtccacaaaacactttaatgtattatttcgtttattgcaaggagagagagaaaaaaaaaaacattctggcataaagccaactaattactgatacactcaggagactcaccgtcagtacatgatatgctattttcctccaagtgttccttatttcttcccttctctccttgccagctccccgcccttctggaatttcttggttcaaggacaagtgctgactcagcatgggccaccttcttaggctaacttactgctttccctgctcctaaggagtcaccagagggggagcaaatggagcaccagcacattctccaattctcctaggtgtcgtagctctcctcactgattatgaattgtttctgggagaacagaatgagctgttaggctgcaaatgatctaacctttcatacttgaccatgtagactttccgcatttattccagtcctcatttccaaatttcactaacagaattgcagagatcgtaggattctattgtcacagaatagaaatctgtgatgcttatgtgttgcaaacctaatttctctatatatttgtgttagaggaaagttatatttttctattatctttgtagaagaactttggtttttaacaatcatggtaacttaaaaacaagtttcttggtaacttagatgatccagtcattaaaatcatgatatagattctaaatattggggaatttggagatttatgattcttaaaggcattataaaaaataaataggtatatggtatacagttctaaatagcttggaattatgagtgtaaatgttaagtgtactagcagtgatttctctttaaaaaataagcaaaaattgaccctggattgatgaaattttttttaacccttattcatgttgtaggaaattttatagacagacattgtaaaagagtgaatggattgctattgaaagataatctgatatcaacttaacttgctggtgactttaaatttcatatactggctttcatgctacatttatatcttagcaataagtattcatgagtctcatatttgaaggtagagaatcttgaatagtaaagagttctggtttacgtctttaaaggtcagaaatatgcactgttatatctagtttgtatatttcctctagtaaaaatctatgcctgactgaaagtgctgaatttatggtagaacaaaagagacttatcccacccagattgattcaaatacctggagataccagtttcagacatgtgttgatacagcttattaaaatagtaaactcactaataagcatttttgtattttggattgattaaagaatgtttatgtcaagaaaagcatattttgaaagtaattacaaccaytagttataattaattcggtttatcttttttaaggaaggctaggatttaataaggtgggttttcctaaagcctttaatccatggcttttattttcaccacggtagattttccatataatttccctccttactttttcttaatgtcagatgaggtatatatatcttttgtaacttcctggtgtctgatcttagatacttctaaagctgatkgtgaggattaatggacagggattctatccagtaattgtgggttttagaagaaacatactcatcctagagaaagaactggcacacatttgcccatttttgtagaatttggcctagattcgcaaagaaaaaaataaattttggagacttctgatggttcattttcttaagaaagaaagaaaatgttgttattattatttgcatttggtactgtgctatgtaaataaatcagtggcatctaagttagacttgattttgaagtgctgttattgattcactaasaaccactaagtttctccatctgcttcctatttacaaaatggagatgttttctgtttctaatttgcccctcagaagtgcagtgttataaggattaattagagaaagccaatgggctgaacagtgaggaagacataaatagagacaaacggggacattaccaggtgcctcctctttttgttcatggttgatcttcaatctcaatttttttatacaaagggcatctcattgtattatttggtccaatgacttgcattgaaaggatactgactgccccagaattcatttgcttttcttagtgaaatgccttaacattaatatttttcagggtctaacttttcctaaagattttcaggtcccagaatttcattctgaatggttgggctttatcagattatttttcaatagcaagccattcactcttttacaatgtctatctataaaatttcccacaatagttcataatcctcttttcagcagccttttctccttctttatcacttcttttgtccacttattttcaggatgcaaagttggcgtcactgacttgctcatggcttcttgaacatctgtgtgaggcaggattgctgaagatcccaggcttttgagttaaactgcctggggctgaatccctgttctaatctggctgtgcagtgttagtaatggtacctccatttaaccatctttaaagcgaaaaatttctcatggattcctgtgaggattaagataatataaggtctgcggcaccggcatatgataaatgctcaaaatagtactattacttgtattaacattagaaataaacatttaggcacaaggaaggaaaaaataagcaatcaggaggaagaaaaagagcagtcagaaaatggtgagaattagcatggggtgtgttttgaaagtaaagaagaagagacagtcattcgaaaatagagaattttctatacctttgctactcagaatggctcctggaccagcagcatgggcaccctggaagctttccagaaattcagaatctcaggcccccaaagccccaggaatctaaatctgcattttaacaaaatccccaggagattcattttaaagcttgagaaggcctggtctacaacctaacatgcagcagagttgacagatgagattaagactaaacaaaccttcgaattttcctgctagacctttagtggagaaaacagggaggaatgaataggtggcaaataaaagagagaaatcaggtattgataattctttcaggaagctcaaaaattaatcagggtgaaaaaacgttagataatacctttaaaatgtagcagaatcgaagggaaatttatttttatgaacaagaaaaagttgagtctgtgtgcaggtggagctgaagtgtcacacagggtaaaagattgaaaagtaatgaatacatgaagacatggatagctaagagatggggcaaagagtgtttgaaaaacattgacagctggtaagtttcagaaaaacaccttcatagactagtgcaaagatggaaagagtgaggtcaataagagagaagatatgtaattaggtgtcttcagggctgtttgctgggagtaagtagggcaggaatgttattggtagctgatgttttgatagggttagaaccactttggtgagtgagatagaactagagttgtaaataaattttagatctagtgtgaactctgataggtmggagctgcatggaatattgtgttgagaaggcttctgaggccaacataatattaacagataagagctatgtatgtcatgagcagttcctggcattataattagggagacatagtagtgtatgctctgcacattcaccatccctggtataaaggatctcctggccttgtatgaaattattgagtagaaataaagaactataacatgaaagtgtgatgaatcatttttgcagtattttgtcttctttctccaataatccttagcctaggaatagaaaatacagacaagggactaacgagcagtaataagcttatttttgaaaggcttgacttttatagtctttatgactttttttttttaataaaaaagcaaataaagcctacatttgaacaattttatgttttaaaaagtgtgggctcttgtatagaacagactatggaatttgaacatcacatctactactttttagctatgcctttgggcaaattatagttaagcattttctagaatgaaaaactcagttttctgagtttaatattagtagtaataataactaatagtaatttccaaatagagttgaagagaagattaaatgaatgtaacatcatgcctgatgaattcttctgctggttacttttatcctttagtgttgttttcagttgtttttttttttctgtcaatttcttctctattaaaaattgttttctgtcaccacgcaaagcaaccaggaatcatagattatggttgaaaaatcaaatggcaggctatttgaaaaatatttatttcaaaattttatttgaaaaaattccccactgctataatttaatgcttattcctaatctccttaatttccgttgctttatgtattatatagagataaggtggagggaaactgatcatgggtgatgataactgcagaactgctgtaagcaaggcttgttcagaaactgacaaatctattacaaagtgactcatggaagtggaggttctgtcacaaacagggtcagttattacttggcagtattctgtgtgctttagaagaaaataatgggctgacatagcatagaactttgggaataaaagtttctggatcatggcagttggcccaggacaccagacctagaatttgcaccggtagaatttgtctgccccaaagtaactggcaataatgccaatcaagacttgtgcctactcttccatgggttctggtccttcagtcacatttggccaggaaccttcttggctgatgaacttttatatggatacactataaaagagcacagctgagagccaaggagtgggatgcattaattccataaccacattttttctttatccttcaaaaaatttgagaatatatgacactgacagatgacatttttttggcagtgctgttaggtctttgctacaaggcagttctccatctttgtagttgcagagttataacttggtttctaaaagaaatcctcatagctattcacctggctcatatttcattctcagcttgaaattcaaatgtattgactctcctatttttatgtaaagtgatgcgtttagttagattgtcacatcttctatatattgtgtacttaatcagtttagtaagaaaaaaatctatagaaaatgctttggatgaagtatgcctattaaaatctcctacatttggctagttttattaacatgcaattcttaatatgtagcattcactacctttctatataactagtttctcattctcttcccatctgtatgagattttttcattttctttcagaatatacatcaaaataatgcttttgtttctttttcacaagtaatagatgttcatatcagaataatgaaaaggcacagataagtaaatagaagaaatacaatcatatttaattccatcattccaagaaagccattgttaattccagtgcattctaaggggttgcaaactcagatgcatagagaaggccagttgatatgataaatgtacaaatcaagctggatgggagccatgggactagtccttgcaagcatgtgggcctggggtcccctgttcttcctatttttcaggagaagaagggtatcagatttttatataacacatctgatattgaaatttgaacgtgataaaaattggtaaagactctgtagaaaccaaacagaataggtatgcacaccttttgctttgttccttttgtatatataaactataatgttagaaattacaatggtgtttgcatttcttcatttttaactgcactttaatatttcttccttgaataaatgacatttgcttatctcatttcctcttgataggcatttacattgttttaggctttgctattatggcaatcattttctgaacatgcttgtgcatgttttctggtacatgtatgggtataaggtatattggaagtggaattgctgagctaagtcatagggtgggtacatgttcaactgtgtaagataattccaagttattttggaagatgtttgaaaccaatgtatatgcycatcagcagcctatgaaggctgctagtgtttcccatgtttcccaacacttgtatgtttagattttttcatttttgtcgtttggagaatgttcgtgtgatcatttgcactttcctgattagcatgaggttgagtatcttttgaaacttattgatttgatacttattcaacatagtgtttcgacttatgggaaatgcttgctttgtctactttcttttgaattgtttctatcttttgttgacttatggaagtcattgtaataatttgatactaatcccgtgtcaattttattaccaatatcttttcccagattgcatatcatcctttcacttccttttagtgtcattgataaatggaagctttctttttgatggattcaaactttttttttaactaaacagttaatactttttaatgtcttgtttgaaatttcctatgaaaggtcataaagatatcctcccatattttattctaagatgaaagtgatctatcactttaccttttaatccatctgggatttttttgtgtttggtatgaggtgcagatccagtttcatttttgttttccatatggttagccaagtatccctgactaaccggtgatcggcagtgccactattgccatatatcaaatttcttatatatcaaacatgctgtttctgtttctgaactctgtttggttccattgctgagacctttgcttctcatgtacactatgtttatagagcaaaacatattgttttgctaaaccgtgctttattttctgggaaaaaaaacccccaaggtttatattaattttatgaaaaaatggctgtcagtttattttataccttttcccatctgcccctttatgctgattataaggattaaccctttccattatctaagctttatgatgatccacttgagtaatattggaaaagaaggaacaacatgtccaggtttcagacacatgctcagtgaggcaaaatggaatacagaaattcctacctaagtagtagccaagtcaaagagagaaatgcctctctgtggtgcccctgagaaggaacaggggttgtaactgatgaactcactatgtaggccacagcctgatgcttgaatatattgctgataaaaatccttataaatatctagatagtgattgtaaattaaacttgtattccatctgctattagtttaaaatctactaaacccatttttcagcctgtgaaaaatataccacctggccaagtgctttcacattatttatgtatggggcatttagggttttcttatatcttttttccttttgctctacttcaggatcttttatatgtttaaagtgaaaagtatttccacatatctctatttaaaataatttagtagatccttctatgtctatttttttgaattagaaatgcaattctggattgttgtaaatgaattatttgagtctgttttgtctcaatgtaacagcagaatagtggaattcgtatggaaataattgttttacacttaaaaaattcttttagtgacctcaaattcaagaaaaaagaaattaactgtatcattattttctatagtggtatttaaaatattgtaataacatgcttaccatgttctctgaaagtgaaccaagagagttatattgcagatctattctctgttttttctcctctgtttctttaccttttctttttcctttttttctttctcctcccttttttcttctcttttaaatatttgtaaattaatgtccttacctggaaatcctgggaatattttatcttgagcttgatatctgggctttatttaatgactcctttagtggaatttctaactataaatgaaatacattttccctaaatgctgtggactttgcagtacaggaggccgattaggtcaagatatctactattgtttttctatatgtcagaaacagtgtttcaaggttcagcaagtcatgaaaagtgtttcaaggtccatcaaggagagactcagagggatgattgaggaggtgtgcgctcactgtgtctgtccctgccatcatctccaaatgggattgtttgcatccgtgtaactgctgctctgaggggaaataaagtttatagagaatctttaaattattccagtgtaggaaaaaattgtaaggtcaactttctcatcacctgccaatgcaataatttttttttgtaggttgaaagcatattcaagaagagtttttttaaaaagatgtttaagacttacttttccagttctttttttgtaactacaaacagaacttgtcagtagaggtaatgatacagaaagggaaagaagtatgaattttaaatgaatggagcgcaggctattaagaaagtaaatttattcgtgcaaaccattgtgcatgtattctataggttattccagccccaactgggttaccttctccctgtactcactagcaatccagtcagtgtggttctagttagaatcccataaatctgtaacagaattaattgcatatccttccaagctagcagtgaaaggagtaacattggccaggattttgatgttttgccatattctaaaatcaacatgatggtatacgacattgctgmaaacattaatttagagggtggctggaaattgctgaaaatattgaactctagctagtgaacccaaacattctcctttttttctacttctagatcagagaagtccatgtagttaaaacttcactcttaatttaattctctacctcaagtatatatgcataaaaccatatttctttgtttagcaagctgaacactgctttttataatattagtctgtaaatcataagtgtgaggcaattggatcattgtgctctgtaaggagcatattccacaatagccagtttattttatttgacttttatctagcccttgctagcaatatactggattctgtttgatgcattttgcataagggttctatttggtccataatggtttgtgtaatgaactatttgttctcttctagatgacagccagttgcttaaaacctataatgagatgtcaggtgaattgcactgattggcattgatggatggacttgttgaaatattgcagagtttccgtaggggcgtagaggaaaatggctgtttagaggtttgggtctcctaagcactgaaactgtcatcacataaacagaaccacttctgcaggtctgaggtgtcatcgtgcattttctggctaatctatccattcatctcaatagtccagaactcgcgcatcatgtcactctttgcctttgttctgcactttgatctttcagaatgtctgtcagaagaaaagtgtttatattgaattatgtgtggaaaggggtaggctgcatacttcagaatcttggcatgaaatttgctaaacaaaccttgccagttgctccgcagcaataatcgaagtatggatttcaatttaacgatatgtaggtgcacacttttccccttcaaaaacaactttaatgtggatgtttgggtgtaggagattttattttgttttgtttttcctgtagaaagtatgtagcacctttattgttaactgttaaaattaatgttaagaaggaagataaatgaatttttcaaaatcaacttttttccactaaaattctggttaaatgcattaactaaatgtatgccttggctgaaatatctttttgtgtgtatattttatctcactgattctaacattctagtataagatagtctattttggtatccattatatctattataatacatgtattagaacacattaggaattccacagcaaaagcaaaagcaaacaaaaataggaactaattacattgaaaagtactatacagacacaatagcagaaacaatgggtgaattattagtttctgcattctgtcacagctatccattctcttttctcatacctttttaatatgtttgaaataaaaaataattatgagatcaaggtttttttccttcawagttgtctaaaatgattaaggacatcaatttccactgatatgatgctgtgggcaagaaaatgtataatggttcaattccccaggttaacttgccttgcagtgggcaaaaacagacttcagagatcttttgacattggtcatatgtctttcctcagtctggagatggaagttttggtgctcttaactgctatatcctgggcttctcgaggtaatgacagatcttatgctaacttagggaccctttggattaaaattgaatagtaacctgcaatgacatggatgatctttgaatcaataactttcytactacaaatgaagcattcatggaagctgaatgagctcagctaacccagtaaggtaactcacattcaacaaactgatttggtctttgacaaggctcaagtgtgagtagttctgaaagtttcccaggtgattccaatgtgcaagccaagttcaaagccactgagctaggcagattgaacagaatcattgcaactgtatgaatatgaagctttccaggcagaatgaaatacatggacactcatgagaatctagagctagctggtctaccaagggcttctcaaacctgcaaaccaagccctgctgatctaccaagagcttctcaaacctccaaaccaggacaggcatggcaggaagagggttgaaccacagcagagagctggtgagacaaggtagtctgttttccaggactgtattttcccttaagtgaagaccacgtcagatgttaaatgaagactatgaccctttaaaggctttggcttgcttagtatagacacttcttcccactcctagtgtcattcttgaatggtttaaaatatgttgatagaagagtaagaggggcagagctgttattattttctgcaaatttttaaacatgagaacatcacgacagtgtccctaggattataagctaggcccagacctagtctagtctgtgatctaccagggttgacagaaaaaagctttttgactagctgaacagcttctggcagacttggttgtgtttgatggcatttatggtgatgtcagtgatgccatggtagtgactggctgttacagattgtaaaaaggacaaggcatttggtacaggcaaacagaggtattaaccatataacagatttctctattcataacaatggttacttttaataaactggaaattgcatgtttagtcatttgtctgatacttgttcagacttggagtcaaaagacttgagttttttagcctcattttgtaattttaataattatttttactattcactatattctaactttttactagtatcaataaattaatatctcccccattatttttacaagtacttargttaaatatctaattatagagtgcttttcatatttttaaaaatatcaactgtcaaccacaaaaagaactggagtcacaagtataagtctactgtaagtatactgctatgtatttgtagtaatttctagctgagcactaacgagtaagaaaaggtggtgtagtaagaaaaggtgggtgggtatgtttcttcatttatttcaagttatagtttatgtaaagttcatatggttttagaacatttttattgaggacctctggtatatgttaccttaaaaaaaaggatagcttaagtatccttcatttattcatctgtaaaacaggggataataatagtgactgcatatgggattattacaatacaaaaagatgtatatttggagggtcttagcaatgacagtgaaaactattttgttgagctttgtgtccaagtaattcagacatcctgatgaactttctttttgtttgaatattgaaaacatttttctactttaatgggatttcataataggttagagattccatgccaggaattgaggtgtaaatgccacatttgcaatgctacttcccttgaaatccaggtgaaactaaagaagctttgaaggaaacatgacaaaacttaaactcttcaggtaacccttcttttctaatcattgacattttttaggttgctttgatattttgttttggaaaaaaatgataatatattttttctggcatttaagtcatgctaacttttaaagagaaacagtagacttatacttgtgactccagttttttttgtggttgacatttgatatttttagaaatagaaaagcactctataattagatatttaatctaagtacttctaaaaataatgggggagatattaatttattgatactgtaaaaaatgttacaatatggtgaatataaaaattattgaaatcacaaaatggagttaaaatgtcactagttccctctcggatgtgtttcttttacattgaaaaaatgcttattcactaaatcatactatgcatatatatcataaaaatatagcttaaccgtatcatatatactagatatatgtagtacatgcataaatctagtgtgtatgtatgtgtgtatatatatatatatatatacacacacacatatataggtacagtttagaagttatatatatatgtagtgtaggtgtaggtgtgtgtatatatagttttgaatgtatacacacaaatacacagatgcgttgttgactgggataggttctgataaatacatggttaggtgatttcctcattgtgtgaacatcttagagagcacttacaacacaagcctagagagtatagcctactacacacctaggctatatggtatagtctgttgctcctaggctacaaacctgtacagcatgttactgtatggcatacttcaggcaattgtaaaacaatggtaagtatttctgtatctaggcatagaaaaggtaatgcatttggctacaacattaaaatggctacaacatcactaggttataggaatttttcagctccataaaaatcttatgggaccactgtatatgtgttcagtcattgactgaaacattgttatgctgggtgtctccagacctcttaaagtctttatatatataaaatatataaagtctatatatttagatcctctgctgttggcagcataatatacagtcatgtgctgcataacaatgtttgggtcaatgacagatggtatgtacaacagtggtcccataagattataatggagctgaaaagttcctattgcctggtgctattaagctgtcctaatgtcatagtgtaaagcattcctcacgtgttttttggtgatggtggtgtaaacaagcctaatctgccagttgcataaaagcctagcacatatagttatgtacaacacatatcacttgataataattatgttactggtttatgtatttactatactattaatcattattttaaaatgtggttatgtaaacaaagttaattgtaaacagcctcaggctggtccttcagaaggagatgatagcttcatgcatgttactacataaaattgtttgggataataaataagataacttggctgggtgaggcggctcacgcctggaatcccagcactttgggaggctgaggcaggcggattacctcagttcaggagtttgagaccagcctgaccaacatggtgaaaccccatctctactaaaaatacaaaaattagctgggcatggtggcacatgcttgtaatcccagtactcaggaggctgaggcaggagaattgcttgaacccgggaggtggaggttgcagtgagccgagatcacgccactgcgctccagcctgggcgacggagctagactccatctcaaaacaacaacaacaacaaaaaaaaaacaaaagagaatttatataatgcggttggtatatggtaggcccttactaagttgtcctttccttttctccttagctaggacaccacatatgtggtgcagatggtaccctgcacactggcacttcgctgaggggtgaatgggtgctgcagtccagtgtgctctcatttttagtaagcctaaagccccagtgtggagctgcattcacactagcctgggttagtggtggccctgcccctagggctctgaggttgagaatcagaagttcatccaggactgaatcctagctggccctaaccagctgcaaggtcctgggtatgccacctcacagcttggtatccatgcctcatctagaggaaatgcattaggatctgtccctaatgctaattcagatgtcatttttttcaaagatgaaatgaaatcatgtttgtgaagaaataattataaaatgaatgtattgtacaatttccattgtaatagtttttatatgcagaataggcaagatcattaaaacatgattattgaccttgagtgttatcgtttagttaggtgggtggttttaaagaaggagccaagagatctttgtgacccttctgagccagagggcagtttggtaatggggaggaggtataagaaatgaggccctggagggagtaagagatacacggaaggccactgtgaaaggcaatgattagagcatgacactgatgttgcttgggccatgaaagaagagaagtgggtactctgctcaattaaaaaaattatcaaaataaattcaatctagaagtagagataatttctcttctaaataagatttgaaatgtgtacatttgtaatagttctatttccaggacataaatattattttaaaatgtgactaaacttgccctgatgccataattttgatttcatagaatgagtacatacttcctcatgcttcatatgcagaatgctttgatttatcagctttggtatattaggacttctggcactctaagttgatgcatatttccattttaatgttaaattactgaattaattattgtatatttctgttgcttcgggtgcctggcagtcatgaaataattcttacaccatattgatgcagacttctggttaataaccataaaactaacatgagcctcccttccttttgcttaaattgagaaagagctatcagagatgctgaagctaaggtccagttaataataacctggaaactatagattaacactgtatctctagcctagaacttctactttatggtcactttaattcatcaataatcatatgcctgtttgctttaaaaaaccatcagtgtcttcatcagcttaggctgctgtaatagactgctgggtgctataccatccagtttatggtattttattatagcagcgtaacttaggtgctataccatccagtttatgttattttattatggcaacctaagctgatgaagacattaatggttttttaaagggaacaagcatatgattattgatgaattaaagagactgtaaagtagtccttggctagagatacagtgttgacagtgctgatatagcaccagtttctgttcttatagcaacagaaattgatttctcacagttatggaggctggaagtccaagatcagagtgccagcatggttgagttctggtgggagcctgcttcctgattcatagacagttaccttttcacatggtggatgggtgatggaactctcaggggtctcttttataagggcaccaatcccatwcataagggtagagccatggatgattgggtaggacccaatcacctaccaaaggcccacctcctaataccatcacattggaggttagaattttaacgtattcagtatatagtgtttggttttctagaggtttcctttaaaaatgagcataagttttatgtacaaaatgttgtcaatatttttctagtcagtagtatttattaaccatattaactactgatttaggaagatttcttctttttttccttttaagaatgagaaataaactcgttatccatatatgygcatgacacttgatatgttgaagctaaaataaagacaataatttcaatgtaagttttaaaatcttctaaccaaagtgaatgtagcaaatgtgtttaatatgatttgaaatttaaatagcagcctccagagttcaggtgtactttattctttcagtaaattgggtggactatggattcatattgagcagttgttctgatttatcttgcctgtgatttcttctccaaagataataatgtaataatgattcattaaggatctcgttacatttaagcattaaaaaaatctgcagttatccatacaaagataagaattttatttttattatttttccttttgttctccagatttaaagtagacatttggtcctgtagatagagtagggaacaagaaaatggtttaattttacatcttaagaaatacttaactttcattccagaagacttaaaggaggtctcagattccccagtagatgcaagaaaatgagtaaacctagaaacttggaaatagatggtgttttaaataattagttagcaaaatgaagtgctcgaagggttttgaggcagcaaaaacaagaggcataactaaattaggtsccattttccagtgaccccatactgatagcactgactgaatgattgagtgcagacttaggaaaatataagagattcgagtaatcagcaggtgacaagtcaaaggagtttcaattgtacaaatgtcaaaactattagaaactttcttttagtacaaacaaataccacagttaaatttctgagagagtaattaatttagtatgtgtttgtttatatccgtgtatgtattatattaaaaagtttatttttaataaattatataaaaaactttatgtgtatacttagaaactacatttattttgttttactacactgctaatcatattacagtatagctttttcataataatgccagataaaaatatctgagaatggattaaattcacattaagaatagttaggagagaaaggagcctaaccacagaaagtcaaattttagtaatctaatttttatgtggatgtttactagagcaaagtgaaattatatatacatatacatataaatatatgcacacatgcctaactgtagatatatatttatgcacatatgtttatatgcatataaatatgtttatgtatatgcatagtctctgttttggagtaaacatacgcattttataaatgcatagcccataccaaaacaaaacaaaacaaaatgccttcacttcaatatgtctacacaattgaagcgatagagcatatagcaaagggagcttgtttttatttaaatgacatctgtattgtttttagtagaactaaatatggaaagccttcccttaattcagttttatctaatgttgtaattggttatctgatttatgggcacatcagttttacttagatacctgccaaaataaaaccaaagtttgctttttagaagatttatacctaaaaaaatcattattcttactacacatgaggctctatgtttgtagttgaaatgcagctattgacatttataactttataactcataaataacttctctgttttaaaatacttttgaaaatctaccgctcaaaaatctgattctgtgaataatagaaaatgcacttaagagaatgaatacaaactacattatttttagtatgtcatcaggttatattgattcttagataagtatagattaaaatcgtaaccacattatccaacattagtggtcactgtttagttgctagaagttctgtcagtagagaaaacaattaagtttgctaatgtagcaagtaggcctgaaatccatgtataccagacaaacaacagctttgtcttgctatgagaaatctgtttgtattgtgagcatcttttcagggaaatcaatactagttttttcttgaatccttgaatgcattgcactattctgtctctaaatggcctcctgtcctatgaaagaaattgaactgagttagggtaaggaattggttagtgtgccagttgtgtctttttgaactcacacacaaacaatttaaaagtctagtttcacaaacagttcttaaattttaagattaaccttaagtatgcaatccttttctgtcttagtttcagaacctgtcacaagggcactgaatttttcccccagtatttgttcttctgttttactgggaggattgttgtctgacttcattgtgtagtttttctgaggcttgcggtacattattggcaaataattataaggtctctatttcttgaccctcacatgtgattcttaaacagatctaaggtatcttatttccacatagatgctgcagatttcctaaaggatcagttagaacttcctggaacacccttggatttgggtcttgcagctggctcttactcaagaaaacctccactaagtcagggcagaatcgctsctgttgctccccacctggagtagaatgaatggagtaacacattttagtttttctctaaaaccaattgagttcttaaagactctgatctctaagtaaaatgagacatttaattatgctagtgaatacaaatgtatcaaattttactttaaaaggcagaggctctctcaaattagattttataaaaattgtttgcagaaggcctgaaacaaagtgacacaataagattaaaatcaaataatgggttaacgtatatcttaattgatatatagtaaatagggaaaattatataacaacttatagaatataagacaaaaaagcattacatgagaaaaaaggactttttaaaataatttaaagaaacatccatggtgaaaacacagttgttgtagtttatgtaccaaacaccaaagcaaagagtgtcaaattaaattgtattgattaaatcgtatattgcagtttggttattaagactggcagaaagagaccaaagcattacttgttataagtttgccataaaatttttcaagggtatttggtgaaacagaagagagtcatctgtatagagaggaaggatgcagcaattgactgtatggcttctcctttggccctcacgctgttgcccttgactctcctggcacaggtatggtctagcgatggtcttcactgagctgaaagggaggccaaatacttgcaaaattggaatccatttacacattggtgtccgtcaccaaacacaccaaacatcaataagcttctcttagaggttttttgtttgtttttaaacaagtgcataattttcaaagctgctttctcatctaggaggaaagagaagttctggggctccccaaacatctttacctccagcactctggagcttaagaaagctatctcttcatatttataaagcaaaacttttggggaaaaacaaaagattagggccaggtgctgtggctcatgcctgtaatcccagcactttggcactttgggaggacgaggcagacagatcgcttgaggccaggaattcaagaccagccaggccaacatggagaaaccccatgtttactaaaattacaaaaattagtccggtgtggtggtgcatgcctatagtcctgcactactggggagaccaaggcacaagaattgcctaaacccaggaggcagcggttgcaatgagctgagatcatgccactgcactccagcctgggtgacagagcaagactctgtctcaaaaaaaaaaaaaaaaaaaaaggaaaagaaaaaaaagaaaaataaaataaaataaagataaaagattaattgtgttagaaacacaattttattctgggtctttgaccacatagtttgggaagaatttggaagatataattaacatggttgaataaatttctctaactagaaagagcatagtttatattatctgaccaccaagcagtaaagtataaattaatatcaaagctttacgtaagaaaatcacgggagatttaaaagaaaaatcaactttctaaattttgggatcaaaaggaaataaaaactaatcactgacaagaaaatagtggcaatgatgggataaaatatcataatgtatggcataggacaaaactataattaatagacaaattttaggccattttttattaagtaagaaaaagtgagaatagactattcattcagtactcaaatttagataaataatgctgctgaaataatatgaagaaaataaaaataacttaaataataaaatattaattagagacaactttaacagagtagacaaataggttgaagagtatattttaggaaaatacatgctgacaagagagttcttatttcagggtttggcagtatatttaacgttacaaaatattttagcttcttactttttttgttgttgcttgtttcctatttttcgcctcaggtatatggactcttggatagtccatgcatgaaagactttaatgccagttcatctctgaggttaaatacaaatgtgtgtgtgagtaacatttttctaaacgtagtaataatgtttttctaatgtgaatatgagagtctcaaagtagtctggaactccctcataaaaaaatccagttattgtttccactcaaacagtaaatcatcttggtagaccaaaggagaaaacctacgtggtatttttcctttaggaaatatccaaaatatgttctatatctattccatatcttaaaaaaaaagataagacaaaataaaacaagaaacaaaaatagttatagaaagtgctttcttaatagtaacaagtgattcccaagccagattgaaatatcaattatatatgtaatagaaaactactacatttttagtaaaaaataagggaaaagttgccacctccaccatggtattctggaagttctaatgaatgtattgtgtcaggaagaaaacctttgagatataattcttagaaatatgaagggaatattgccattgtttttgcaagattttatttcaaggaacagggtcrttcattaagtattgagtatctgccatatggcagttacttttctaagccctggagatcaaactgtgcacaggacaggcaaggcctgcgcccatggagtgtattatttagagtgactgtgtagagaaagacaataaggaaacaaatgaacaagaaaatttcagatagcagtctaataatttcagatacgatgtcattgtctacctaaaagtcaaaatgtgtttgcagaaaaattattagaaatgacatgaaggaatagtaagctgaggatgtaaaatacatataaaagtaataattttaaagtaattatttggaaacagttatagacaaatatctccattcatgatagcaacaaaaaacataaaatatactgaaacttaaggaagtatagaacatgaaatatatatctgtatatgtgtatgagtgtgtatgtatatgtatataaatgtgcaaatacaaatatacacacacacatattttctttttaatttggaaaatccgtgactaaatggggcaacttaaatttctgggtagaaagatgcattgtggtaaagatgtcatgtcttttcatacttttaaaataaatgtactgttataaattaattctaacaagtttttaaggaaacttgtaaagagaaaatgacattcatctgaaatgaacattaaagaaccaccatacataatttgattaagaagagaaataaagtcacccagcctacaagatattaaaatgcatatcataaagctgcaatagaaatgaactagaaaacccagaaatcgatgtgctcgtgcagggatggcacatttgtggcacagttaccttctttccccatattgttaccatggtagacattcactagtaattgatgttgtcacatttccctgctgggcctggacgtgatctcagaactagatgaacactattaggctatcaaagttggcacgtggattaaaacattttggcaccctgttcaggtatatgataaaactggcatttaagttagtaaagaaatgaagggttatttcagaaatgattctgggaaaaactggctctttggagaaaaaaatagtcctttacttcacattatatactgaaataaattccagatggatcacaggattgaatgtaaaaaaagaaagcaggaaaaagcttgaagataatatagatatgcatctaacattaaagaaagcttttttagcatgaaagaaaaggaagaaatcaatacaagaaagaactgatgaccccgtctctactaaaaaaaaaaaaatacaaaaaattagccggcgtggtggcgggcgtctgcagtcccagctacacggaaggctgaggcaggagaatggcgtgaacccgggaggcggagcttgcagtgagccgagattgcaccactgcactccagcctgggtgacagagcgagactctgactccgtctcaaaaaaaaaaaaaaagaaagaactgatgaaattactacaacattttaaatttctttgtcttaaatgtactagttacaaaacatactgggtatgttttacaatgttttgtaaaatattatttggaagtacacataggccaggcatggtggctcatgcctgtaatcccagccatttgggaggccaaggtgggaggatcacttgaccttaacagttaaagatgaatctaggcaacataggaagatctcatctctacaaagaataaaatagttttccaggtgtggtggtgtgtgcctgtggtcccaggtacttgggaggctgaggtgggaggattgcttgaacccaggaggagaatgtggtgacccgtcactgtgccgctgcacttcaacctgagggacagagggagatcctatctcaagaaaaaaaaaatgcgtacactcaaaacatatacatatgtactagaaggattaaattgaataatgctaaaatatttatagtcattttttaaagattgagatattacaggttattttattgtattttttactttctatattatttaattctgaaagggagtgcctgtcaaaattatgaagggaaacattggaaactaatatttttcaatatcaaatrttcaatattttttccttagcttatttttgaattcccttaacagcttattgaaatacataatggcgttctgcttttaaacatcagtaagttgagattcagggagagcaagtaaatactccaaaatcactgatgcagaaagcagcagggttgtgactggaaaccagtagttgagttatcccataagccattagccagcatgttatggatctctgccctgcttgatgtcaggattggggagaaaaaagaaaaaaaaaaaaaggttaagttcaagtccaggcctgatctttcatcagcagaagggggtttattttattctactttctgtgtctgctcctcattccatcccagtagctcctattcagtccttcaaggaggtgattagatagacacatttctcctgtgaaggatgttaggcttttgagacaaaacatcacagttggatgtaaagtgagacctttctgtttctatttaccttttgcaaatgtgagactctgcctgagataatccttcaatccttcttttcctggcccaccaatgtgtaaagcttggattcaagttggtgtggatgccaaaagtgttaactttgaaaaagaaaagatttatttccttattatagacattcgagaacccttaattctatgtgtgataggcaccttactgcaaaaagaggcaaagtgatggaatcaaataaacacattacagctccagataagaaataagcacttctcaaatgcaggaatgttttaagactgttaatgatactagataggtgtatgttcaataacgttcttctcacagtatgtgtgcttctaaaatcatatcattttcctttgggataataacaccataagaaatgaataaagttgccttagtatgctagtgaatgtagccagttttcaattttggtctgggatatgttaacccactaaagtaaatctgagtgtattttggaaagatacatcactatatcactatagatacattgtattgttttctggtctgtggtagggtctttcccttcctcttctgttgacaggagagtattatttgagaacatctaatcagatataacaattttcaaattgactaaaataagggccatagtcatacttacgatattgttcttctggaactattcgctaatagccatttctcataaattggctttagaatatacctctaaacaacatgatagtgaccactttattgcaaaacaaacccaatgcactgaatctttttatttttaaatacattttataatattgaggtcattacaggcattctctaagagctggaagaaaaaatttcctagcataggacctgctcagtatgttatagagtggacgatatttaatttcactgagytcctttccttcttcccagtttgcttgtcaaaaaaaaaactcacattccatatacccaaaactacctttcaagctgyttttaatgtttaacgcactctttgtttctgcaaagatttagcatttagtatttagatgattatacttattcattttctatttcttctgatcattgtgcttttgatttcctgatatatctgtctaccccatttctctctggtgaaagccattcaggctcagcttaactcatcaatgargctctccccgatccccaactctgaactcccatagattgcttgtttgcacctctgacaccatgtaccttgtatagatcttttcataagttaactttctggcagccccataatgtgcaccctgggcacctgcatcatatatgtgcagttttctcacttctttatggttttcatttccttgagtaattccttactcctcacctcacttggtttgtattttctatcaactccagttttagacctttaaatgaggtcttattttcattgaacttgcatagaaaatcttattttgtaatgttattttgcaatggcctctctaagacaagccttgtggcccccctatgcatgttacttaataccttttgaagccaaaacaacctgaggccacaccctaacttgaaacccaggtcacgctcgccttgaaccttcccacttaccagtggaggggaattaaacacttacaagaacatcgcatgtaacattacactctatgaggtggtcccccagtcccttttgtgcagcctagttagagtaatcaaagcaactcatcacgattaaaccatagctggaaaagagactgttctattgctatagtttcaagcaatctattcccactcgtattcagtcctcagagaaaagaagattacacactgccttcttttgtcatttcagctcttttactgaattccactaatggaatttagtctggtctcttgggatacaccacatggccaaattcattctctgcttttgacagaaatatctaccatggattctctcccttcagctctctcttaccattttcttcacctcccgcaatgtggcagctcatcagtgtttttatgtctttgtaaccctcttgggtctggcctttcatgaagattgccagtctcagatctgcctagttctgctgatagataaggaatatggagcttccatttctgaggataaaagaagattcgaagaggaagagtatctcctgctcaaagagggcttgtctctctttgctttaaaaagctcccatttttataagttgaatcttttctatgtttcagcatgggctggatcaaggggggaatctaccctgccacagctttctgtccatcactattcttgttctatttatgtgtagattttcagccaatataatatgttggtacccagtgaggagttttgcatataaaaagggctcaattaaatgctggattcataatcctgcccatttaaaaaaagtcccacattttattctcttttgctattatagaatctgagtacaattaaagctttctccaaattgcctgtgttgtatttctcagtcagaagcttgcaaagaatattttaaacagttgtcgtgtgggcttttcccgaaatgccatgtcactccaaaagtgatactctgctattttgactactcatagaaaatgaggaaggaggtaggctgaacagagagaaattccaactgaagtagtactcctagccaagccagtggtatagcaccattgctcatctttagaattttagaaataactaaggcagtatgtacttttaaaaaycttttatttcagtggcaaaataaatgattaaataataatatcagttggtatagggataagcgaataaaacatctcatttcttgatattttttatatgaattccaatagtgtgatgtggttatagtctttgttggggactgtgtttgtgacagtaaagcaataaattttattatgtcattatgtgaaaaacatcttaacattttttgtgtgtcttaaagtaggttacagaggacaaaataatctgtggagagaaaaaaaaaagaaaaaagctttccattcacgttagattgcagtaacccagtgatttcttgtactttaaataatttctgaaattttagttttaaattctagtaagaatatttttaaattatacataggatctatgtgggcccatcttatccaggagagagtttatttcacatattcatgtaggcttgttttacaaaaacgacgtaaatgttatgactaaaaaacaccctgctatatttgtacgtgtggctaagataatcaaataagaccattcccaagttgtccctagagtattttatttatgttcccagtacccctgccatgactccctgagaggttctcccttgacactgatcctccttgagcacatctgaagtagctggtagggaaggtgtccacagtgagggctgtgtagctttcagagcccccatcccttccatgtaagtctgaagccccaatattgttttgtgcagcctgtgaggatagaggagaagggaaggaggaagtatttttgagaactagtttcacagtgcttttttgaaattttaatcagagagtttgcttttttaaaccatagacttgtagtttcttagtactttagttccctcagaaatttaacaggttctgatatattgcttctagtcagttccgtgaccaggaaacacatgaaaagttgttctaaatgtagttcctaactctgctctttttctttctttccatgccccgtgcttctttctctactcagtggtggccaccttgagtccatctgaaacaacagactgggggaattggtggggtggctttattcttagctacaatactatttttgttacagaactaagtcttttgtgaattgggaattttaatggaattttgtttttcaaagcttttatatttatttttgctctttgggaatcagatgcagtgtaatttttcagctcttcaaagtatcaaatttcttgacactctcattccttttcatttctagttaatttttgtctgaactaacctttttcttgtcgtaccttgcagtcagtggcaaaaatcaacaatatataagaacatcatggcctcttgaaccctcttgttcgctgaagctgcagtttcactaggcaattggattgcctttcgaatagctgtaggctttagttttactgaatgttttttcattggtatgagttgccagtattccagcttgttttgtctgtttttttgctacctgattttggccactaagctaatacttaagtgttgagcctttgttacagtcccaattcatttcwagttgtcaattcactttctctgttaagctaggctaggagtagtagcacagagaccacaaaataatcagtggataatcacaataatattttatttctcattcacrtaagagtcctggagttataggcatttaggacagcacagcagctctcctgtattcttcagggccctgtagtgatggtagcttcgaaatcagcacatggcttccagtgttgctcaggatgtctgcatcccaggcactagaagggaaacagcatctggacgagtgctcatggtcattctgtaaaggctagatctgaaatggcacttgttacttctactcacattctgttggagacaaggttgtcactttacctaactgcaagggaggctgggttgtatatggtaggaggagagaaacattagtggctggcttgtggtctctgccacaagatgatgggaaggaatttatgtatgtcaagtrtatgcataagcaaaaagaaaatgtttaccttaaagacagttggacttaatgattagatgataagggaccaaaatatggaaaaggaactgtgaactaatcattaatatcatgtgatactctgaaagagataactattttgattttctaaaaatgcagcaaaggcaaagaggggttaataaaagttggcttctgggattgtatactttagagagtgtgtgacttcctgaggatacagttttatatttattttggcattttgtgaacatgactaacatgttctccatacgcatcaattagtgtagttgttctgaaaaaataagatatttttagatctcagttgtgtttgaccctagagaaagacacacacacacacacacacacacacacacacacacacacacacacacacacgtcgtagagaagggaagtaatgggggatgaggcaaggggtgagaactgaacatttatttgttcaaaggtttgaccgtgattttcttggcttttgttaggaagaatatagctagatttaaaagtaattctcggataatgactagacacaattcagtagtgtttgcatggctcttggcaactgatcactccctggaatacactgagagagctggagagggggtttcagtgcctgctcttaggtttttcagaattatggctgagatcccagtaggtcagcaaggtctgtctctcacagcaaccattggttcctagaaacccttagggtttacttatgttcttgaatgtttggttttattcttagttcctgtttttccttcctgtcacatcctagaccaggccactttgcatgtcattcttgagttctgtagtagtttggtacaggctactcctctctttccacttcagtatattctgtgtccggctttttcctgctcataaaaccttaaattactgtacgttgttcaaaggatatatttcagtctgtgcctagacaaagcctagtccagcagccagaagtcttcagttctggccccagttttgccactaactagctgcatggccaaggagaagtgacttatgagaatatatctgtccccagcttctctgtgaaacaataagcattctaaggaagattagaaaacattgtgtttgggctgggcatggtggctcacgcctgtaatcccaacagtttgggaggccaaggcaggcagatcacttgaggtgagtagttcaagaccatcctggctaacatgatgagatcctgtctctactaaaaatacaaaaattagccaggcatggtggcacacacctgtagtcccagctactagggagactgaggtgggagagttgcttgaacccgggaagtggaagttgcaatgagccaagattgtgccattgcactccagcctgggcaayagagtgagactccatctcaaagaacaaagttcagccaggcgcggtggctcatgcctgtaatcctagcactttgggaggctgaggtgagcagatcacctgaggtcaggagttcgggaccagcctggccaacatggtgaaaccccgtctctactaaaaatacaaaaattatccgggcatggtggcacgtgcctgtaattccagctatgtgggaggctgaggcaggagaatcactggaacccggaaggcagaggctgcagtgagccgctatcgtgccactgcattccagcctgagcgatggagcgagacgccatcccccccccaaaaaaaaaagaaagtaaaaaagaagagagaacattgtgtcctacatccttttcttggccatctgaagttgtatagtgatatattttagatgtttcgggaaatcctgtcacaaagtgacctgtttacctgcattaaaccttgcatagccttcaccaattggccagcaaaaccttttgttcacataacatattaacattccacctccacacaaatagtgttacccagaagacacacttagaaataatgaactatgttgaggatactagagagcttctgaaaatgtctccactttttcatctttatcacctattaagaatggcagctttgaagtaagatgcctggatataaacccctcacttagtacacagacaattttgggcaagttacttaatctttttgctctctggtttcttcttctgtcaaatgagggcaatagaagtttttaccatggggttatttacaggattccatgagttcacacaggcctagtgctcacagcagagcctggtatgtagtaagcattgcccattatcaataggcactttgcctatctcctccatggtgcctttcactttcccacactttacttttacttgtatctttcccttatgtaaaatgacctcctcatcctcataatttaactagcaatttctttaatgaggtgagcaagacacagtgaaaagagagaagttttgagtcacacagatttgtattctcattctagaatgaccatttacaagttgtattacctgagtgagttactcagcctatcttgaccttagattccctggcaatctgggattattataatatgatccacaagtgtgctgtgaaccttcaggtacatgattatacattctctttctatctctgtctctgtcactctctctctctctctgtctctctctctctctctctctctsacacacacacacacacacacacacacacacacacactgtctatatctaatctctgtctctctagatagatggatagatagatggdtagatagatagatagatagatagatagatagatagatagacagatattcttaatgggtgatgctaatgatgttaaaatccgttactggtaaatataggtatttggtaaatgcaaacgtgatattcttataattattataattattagcttaaatcctgttctcactctggcaccttttctgacatctgcaatccaactaatgcaattttccagagaatggtaagagattgacctctgtgtattgcgcatccagatcaatttattattgatattgttagtattttaccttgtcatcaacaaagtatttgagttatacttttatttttccagaggacatgatatttcattcttcacatgggaggggtcactcagatatgatttagactagaaagaaccagcgagggctaagggaagcagctgaatatacttttcctctcaccctgtttatttgctggacttgacattcagagttaacagttcactaaaaaggtgtgaatgtaggtctggccatgactggcaaaaaaaaaaaaaaaaaaaaaaaaggaaatactaataaaatagacaaaatttcaccaagatttttaaagaaaataattaagtgtggagggatgtatgaacattattagaaatgggaatgggcagaacagtgattcacttgtgatattaaaatcttaagtaaatacaaaaaaattgctgatgattttaaaaatttagataaaatggatttttttttttaaaaaaacataaattggctcaagatgaaatagaaaatctgaggaacaataatcactaaagaaattaatttaggctaagaagaagagtgaattaaaccagtaaagtttataagaagtatcctggacaagagaagaaacataaaattggtcaaaattagaattaggaaaaatgtattttggaggagagataatcttgaccagataggatcagggaggttcttttcaagatggattagacctggatagtaaaggagtagagggaacagaggagatttgcagcaaatgcagcaaaatggtcacctgttttaaatcaggcatgcttctcctactatttttgttacttttctagatatttgaaatatttctaggtttaaaattaagtttttaaaaggatggatgaggtgaggcagggagggggaggcatgtagaactgtgaacagaaagactcatctggagtcgatttttgtttagaagtgcaggaggaaagtgagctaaaattaaagccacagaattttagagtattatgggaacctcccatttcccattcctgctaccctgacagagctgcttttaataccctagatgctgaaagcttaggaagctttttgattttttgtgttttgtgttttgttttatttgttttgagtgaaatcattttggccttccttttcttggttatgggaaattgtttcagtgaaaatttcctacaggctgcttaaaagccacgcacggaacaatgggccttgtggcaagtgaattgcgtgtggggaagtacttagagtttaatgtgagttatttttatttccattcatagacatgtctcagtgaagttcaaattatcccttggacaatagaaggcagtctgttaatttaaagctagacttttttggttccataaagccaaatttaggattgatttcaaaagctaaataaacaacagtctacctccctattaaaagtgagtgtgtcaggtttctgtgtaccttagtctttaaataatgtccacttagcatttctacaaggggccttaaatatttagaaagaggctatcctttacaattataccttgtttgttaaagggacactcaaaggttggggctgtcttaatcttattactaaaattctgtaggtgtcacatttattttaacaaattaaaatagaggctggaaaagttagggttattgcaggtggtgtgattggaaatattaagagggagcatcgtctagaatccttagagatattgctcagcatcattttcctacaatgccataaaatattattcttaaaaattgtcagaggaaacaaatgttacacttcctaggagtgcttctgaattttgactcttaaacagaatcccctgtggagttcttaaaaagtacacatattgggaccctgttttggaaattctgattcagtggtccaaggggactgggcctgggtgtgtatgcatgtgtgttatgtgtggttttgtgtgtgtgtgtatctgtgtgtggaaagtttcacaagttattttaaagtatatcttgaggatcaagggctagtacaatagactacatttcatttctgttgaaattcattatttaagaactgtactctggagatttaccatgtcaggctgtaacaaggctattgctttcaagatggcaaggtaaagtcttagccgaactgttgtatggaggagcgtgtcatttctgataccaaaggacactatgcaggccaatcagcaacacaattacctatgtatttattaaatagtttcatattttagtttgaaatttttcatttaacataatttaacaaaataagacaaaacttccactgagttaaatacacaagtattcagacatttaatagtattctgactcaatatgatggtcaatgtgatttaccaaaaaatttcagtaaaaatgataatatcgtaattttacaaggtggatttaaattgatacttgcactgtttgactttctaccaaaataggagtacctggtaaaatgctgtggtgtatggagacagttatgagaaactggagggaggatgatagttgaggtaagttcaggctttgagtcacggttcttccaccagctgtgtgacctggcaaatagtttaaccttaaaatagggctaatttttagcaacttcacacattatctcacttaatactcaacttgactaggtaattttgagtatttaatgagataatgtgtgaaaatgcaacataaaaattaaagcagtataattaattgtttggagtggactccctttgcacttcttctctattggaattaatgcatgtatgggactatcatgtggtaattttgtgcatatagattgtggaattgcagaataaatgaattatggcagacattttcacatttatatttttagtgacctaaggcttcaaaaaaaaaaaaaaaactagatacctccccactcttatgggaaggagagaattctttgttagagtattctcaagtttgattattttttcctgagattggatttctttgatattatttatgatcacaacaaagatacattttatgtatcggaaacttgacattgccaagacatattagactttttaaacatgttacctttttaaacactcaaccactgttctcccaaggccgttaccttatttcagagaaagcctaaagcctttaattttacctcaaaaagttttgatctgtagaatttcatgttgataccattaacatttgatgccatttttctatgtgagaaaaatttaggaggtagctaccttcttttgaaagcctatatattggcctagtagttgattctgttttaaattatgttttgataaattataatattttgaaattacactttttattctattaggaaggatgtagggacaagccagtctttttatatggtttctagctgagtagattgtcctgccaatgactctcaaagtgtcattcccttcccttcccttcccttcccttcccttcccttcccttcccttcccttgccttcccttccttctttccttgtttccttctttcctttcttctacaaatatttaccgagggacattgtgtgccaggtactataataggcactggcactgggagtagatgtgaataagaaacacaaactccccactcatacagaatttacattttagtgaggaatatggacaataaataggctaaaaaacttataagatgattacagaaatgaaaagaactacgcaggtattggcaggatgctgtagaagggtggagggatagtatagatgagctcatctgattgcattcagcacaggatatatagttagtttattaatattcccaatagcttggaagcaaagaggagttgatattcccccctccccaccttctccgtatattctcctctctaacttgattttccattttaggctgctcttgattttttacttgaattagattctatcctggaaattgttttaagggatagaggtcaaggtgttaatttttacccttgattgtcactgttaagagacaatgcccctaagtttcacactcctttacgcagaccaggcttaaaaattccaggtttctaatcagcggtgataattgtgtttagccaatatattaaagactgctaaatatttggaattttacatgggaaaaatmcttcagttagcatgtttatcccacaagttctcctgattccttgttgccgattttgatgggtgaatttacttgggtcaaaggttrtcattgtgttgtaaaacacatttttgttttttttggtttacttgtttgtttgttcatttctttttgacttacaatgtaataccttctctcccaataccgattgctccccacccttgccccagaattcagtcttctgagtgagagaaatccactctatgttggaaaaaaaaagatcatcgtcgactcctatctttaggcagatacaaaagggtattgagagaatagatttagggtgcatgagaataggtgattaagggatataatggatgtgaatggaaatagaaggcacacagcttttaaatgggtgaagwtgtgtggacgagagaatacgggggcagaagggagtggtccttgtatattagtggtcatatagtttttgtttttcaaagaaaggaaattgacattgacatattagcactaagttacctaagaactttgttggtaaaaatccactgtattttcaactcagaatgcactgagaggcatcaaatgcttttttattacagaaagaaaaacatgtcacaaaatcttgaaggggcaatctgaaatcaaagctcttcattaaggcaaatcagcatagggattattccctaggcaaatttttgggagatggatcgtacactttattcactgttttaggaaaatgtaatcacccctacctcctgagaaaacatttagcttcccatcctcccagtgttagtgggtgtctttgagaatgcaaaattcttttaatgttaactaaaccagacatcattcagaaatgcaatctgctttttaaaattcatgtaatatatggaaaaattaaaatataagtgatttttaaacattctgccatatggaaatacattctctatgacatcccttctccattgcctgataacaaaaagccagttgtagtgaaatttacatcagagtttgaaagacagaaattccacattcctgagtgttattgaccctattggtagtattaaatcagtcaggagggccagagaaggggctggcctgtggtgtcattttaacaatgtcacaaagtagcagcctcccaaaccaggtattgtctgtgtatttcatcctaagaagcgggagctggcaagatcctgaccctcattgattcagccacatcatcttacagatgagggatctgaaacccactgaggttcggagatttgtccaaggtttaaatacccaacctgaaattccaagtttattctaaagtaaatttgtattacagggtgttatgatccatttctaaacccgaatcctagaagtcatcccttgtagcttctacttatgagtattttccacaactgcttcaaagggctgtccttcttcaactaacagtatttcaaaataagcaaaaactatttaaagcacaactcagaaaaacatagactagcatgatttaataatgaacaatatcagtttttcaattgattccatatttttctcagattttaactgatgtctttgtattttccatgtagaaaagaaggtatgcttaatgtgaacattgtgaaacaaaataagattttgttcttgggaaacccttttacttcaaatttcagaaagtaaagcactgccttagagttgagtttgtttatttttgttttgtttttgtttctttttgtcttttatagcttacaacatttgcctttttttttaacctggaaacattgtgatggactttatagttccttagattggacaagtggaaagatacaggattgtgcgtatgagcctttgctcaacccagtgcttgagctgtgttagcccattgaattctttaagatatatttcagtcataattttacatttaaatatggttaaactaagtttagccaattctgatgcatttttaaaaagaatgtgctgttgagctaagactctatatgctgtattttagccccaagcagatttttatgacaaagtaataaacccctggaaacatgtttataatggaaaatgcaacttgaccttaactagaggaacccaaatgcaccttacaaaaaggctcattttttttttgaaacataygaaatccctttctcccagaggtggtgtcacaggagaaaggtgtataataatagttgtatttaccataaatacctaacatattttatgatgatttgattgtattaaaaaatttcaccttatagattttaataaagctgcctatgggcaaagttattgcagttggatttcttttcctttgcccactgctctgtgtggaaagaagcaagcaacccttataaaaggctttagtttttagtacctggttaataaaaaataatttcctctcctttggacttgttcatgaagctgaaaaatgactctgcaggtcagtggtgtgtggcaaagctaatttctataagctttttatcaggtggtactgagtaaaacaatatgggaaactgaaaaacccacccttctgtaccagatttacaagggtgagggttatccccagtgtcacaaaaagaaaaaaaatgacactttttcttcccaatttctggtacagtaacgaaaaattctgtgttataaaaggtacgaaaggaagaactaaattgtatggaggtgttcagctaaatttagattttaaaattcggacacaaatggcactcattgtttaaagcacagtaaaactcaactttcatttgttgttttgtcgacaagggaatctcatagtaataggctaaatgaggcaaggcacatcatagcaaccaggaaagtgattgtcattcaaataaatatgcaaggcttcttttccccaagcatcacattttctcagaggagtactaggaagacattctaatcaagagaactggagctgcttcccttgaggttcagcagagtgtttggtgtgtgctttgcagagcatgatagagaaatatcacatccctcctgtctctccaagatattcacaggccacattccaggaaagaagctggagcagggctgcataaggctcccaggcacctgtgtagctggcaaatctgctcccagcaagcttgaagtcacattcttttctttagtttttcaggctggggaacagcgaggatgcacagcagcaatgtatgcttaggaggtcacagaacccttctttactgtccttgtgtcagggtacctagggccttcttacactggcctattcgcatcagagcccaaaggaaaagtcagaaaccacaggaatttggagaggttatgggtgagtctttcttttatgatttctattttagcagctagcatggagacttgtagctgacaacattagatggaagaagtaccatgctactttggagtcatgtcttagatgaaggtaaagagagaaaaataattataaggactttggaagatacagactgttttcccttatttagtttagtttaataaaggtaaaagcatgcgatgtgtaggtgtgagagaggttttggattgtaagggtagaaatacgtaaaatttccaacataactgctgttcaacagctgtatcaatgatttggagagtgattgacagggaagaggacatgttttactacaatactgaagtggaagacagagatcaagatgggtgtggtctcagacaagcatgttgctgtagaaactgggggttggcagtattccctcccaccagatgacttcttggtttcactgtgaagttggacatggggtcatccattgagaggatagccgggaggtatgaatgggaacttgaaaagactggatgaggaaggtggacagtttctggaatgggagcagatgctgaaaagtggcacttagaaaagttgagaaccctgcatcaatttatacatgcaattatgtgagtcaaatagaggaggatgaagatgaattaggactctactggataggagaggcagaggaacaagaaagtagatgtacgatgaaagccatgaatcctgaggcccagaaaaggaggaacagactacagtgacattccccttcaaaaactggagattgaatcctgcaaaccacgtctgcattttgtgaaacttactttcctcttaggttttctttaatggattgaggcctgagtgtttagattgagctatcagaagctaaataaacagtagtgtaatttgcataagctagtctcagatgccttagttgtggtataaaaacgcttgggaaactcatctaaatttaatcttttgtaggctgtttatgggctttctggagaaaataagtcttcctactttttgttcagctttcattacttttaatcattttggtcatggcatgtcaaaggttttctctttgaaaagtgcttttagttggtatttttaatgaagtgttatccacttaaagtgtgatataattgtgatattacagctagcagggaacaaaacagcttgatagtcacttccagggctccttgagaaaaacttatactcaaggaaaggtcagctcctctctactctgtatacatcttttgggctcacttttgcacagctgctttgcatgattctatggctgtttgcctcatttgaagatgcagttgggaagaggagcaaagagtggctatgctggtggttggggtggccatattctgcaaaacaccgcattcttctgggagctttgcactttgcatgataagacttaatctgtccctttcaatcataaagtggcagagctagggtatactgtggtgatcatcatggtggtgatcatggtattcatgatggagaataacctcaatgcctcagcagaactggataggtaattttctcttgttataattgtgctcaacaacctgcattggtttttgcctcagttacatcatgtatagagtaaacttaaatgcatgagctttcaaaaaaacccatgctctagtcctagcctcgtttttatttttcttccatattctgctacgtacagctctcttggccagagttactactcatagttcacaatctggtgttacctgcctctggtatttttttatacaggcagtttctctggccctctttccattttcttctatcaaaattatactcattctgagaaacacaattcgaatataacttttgttgatattctcaatctgttgttccctttttcagctcccactggcctttatttgcacactgctttgtggcacttctcatatccacttcctgatttatgactgtttttatacttgtttcattcttttctcaataatctattttgtaaatgccttcagtacctttttgagaaaggaaacaactaatatttgttaggcactgatcttgagttaaacaccatggttgacttggagggggtggatacaatgaaaaataagacttatatccctgttcttcagttctcaaggatcttgtagtctaaccagaagtaggacgggttaacagatatatcaatataatataataggcataaaaatacagtaagctcaaattgttctggaaaacagagtaagctgtctatcctgggatggagagctcaacaaaggcctcctaaaggaatgaaatgaagtaaatcttaaagactgagtaggaatctttaagccagaaaaggaggaggttctgatctgaggaaagagcctgtgcaaaggcatgagacagtgtgggggatagagaagccattaacttctcactatcaatgtagtataaagtaaaagactgagtgaggtgggtggtgagctgggagtgtaaaacagggaccagttcatggagggttttgattgccaagctaaggagctggacttttatcatgaatgtatcggagtgccctcagaaggtttcaggcaagtgagaggcatgataagatttctgggttggagaactcactctggtagcagtgtgaataatgaacatagaggtgagagactggttcatatgtggtattgctgatggttgggatgaattttgtatgtaaaacagttgaatgaaaggttgctttcaggcacttctttactggctaggcacctcttttaagaacagactcaataaaaagccatatacattatattacccttcagagaaaattttgggtggcatagcaaatctaaaaaaaatccacaggaaatctgatgttctaaacagagcgattatataaaacgctggctgtggcttaagcaaacgcaatcacagaattgcctagctgtgagtcagagtcggcttgatcctgaaaagtcccttgcttgatagtaaattagtggcttagggaaatatgtttacatttcatttcatattgtacatctgattgcatgttttgagaattggatataaaatatctttatttacagatttggagctgggaattatattgactgtgtgtacatacagacttaaatttcccagttaagtgtataaatacagtgaggtatatacttacatagcaagataatgctaatttgccattttatctcaaatagaaacatatccaagatataataatggaattcagtgactcttacggtaaagtcatcattactatagaatggcatactaggtcttatgatttgatcaatactaatttattgggggaaggcagaacaggtttaactatttttaactatttctttccatgtacttccatatttctttctatcataaaatcgaaacacgctgttgcacttgttattttcctgggtcttttttctatattcaaaaatacacctgctgtgtatttggttgtagcatcagagtctagcacagtgcctagtcctagtaatttctccatgtatatttgtgagaatgaaatggcaaaatgaataatgagtaaatgaaaataaataaatgcataaacaaatacgtaaatgaaccctaggtaggcttggctcactcataaacatttattgagtagctactatgtccaaggttctgatctggtacaccatggtgagcaaggcaaaaacagttcttgccttttgagttcttgctttatagatcaagacatatgttaatcaaatagttatagaagaaaatatgtaattaagacatattgtaaacattgggaaagaaaagtagaacttgctatgagtctatttaatggagagacttaatctaccctgggtagggcagggtaaataagcttctgtgaagcagtagtctgcaagctcagacctgaatgagttagcattagttccatgaagaggggcgagaccttgtaggcagcagaagagtcttttagagctctcgaggaggctaggaatgcggcatgttggagaaactgacaggccaatgcagaaaagaaaaggggagttgaccttaatcagaaatcaataaggatgaggcaatacgtatcttcaaatttcttctttgaccacatgtacttgtcatataaaaatacaaatataatgtcgtgtaatgcaatgatgttatattcatatttaatatctagttagtccaccaaaaggtatctattgattgacaagttgaaagccagcaaaaatgtaagaggcatcctgtctttaagaggtatataacatacataggcaggacaaatgtaatgttttttttaaagggaaaaataataaatcatgtaaacgatttatcctgaatgaaagagcaatgtcacattagaagaaggagaatgagaataggttgtatattggagaattatgctaggattacgctagactgtaagttctacagggtaagggctgtgtctaacttgtttccagtgcttagtgcctaggcaggtatataatataattactaatgttgaattgattttacttcactttgtattcttgaaattagggtttcttatactattaatagttaagcttagaaacacaaaatacagtaaatcttcacttaatcattgataggtcttggaaactgcaactttaagagaaacgttgtataacaaaatcagttttaccataggctaattgatataaacaatagttaagtttctacagtatatttatggtcacaaaaatcaccaaacttctaaatacttctaatattaactattgaaataaatgtaagctatatgtagaaatgtataaaaagaaagattaataaaaagaagtacgattattgtttatctgattattctacttcagggttgtgggtgtccagagctcaccccagcagctcagggaaccagccctgggcaggacgccatcccattgcagggtgcactcacacacaccctcgcacttacttagatggggactatgtggacacaccaattcaccgaacatgtgcaactttgggctgtgggagcaaacaggaggacccagagaaagcccgcgcagataaagggagcatgcgcaaactccatatagatagtggcccccggcmgggaattgatttttttcttcatcaaagttataacaaaayaacattatttgaggacatgctgtacatagacagcttcatttggaaatgaaaacctagtaaactttccctagctctcccttaaaacagagctgcttcagactagttttacattcctgtttttacctaaacatgcacaaatataactccaatttctaagtattttttgccatatttaattctgcttattgattcctgttctagattgcttttcagtgtctctccacacattttctccccataatcatccccctatcttactcacttttccttccccaagtgaaaatacagcacagccagtatagaagcatctgtaacccacagtgaagtgggaatagccatttggttcctttcctcctggtattgagcaacttttgttcatcaaatctgaaaaacaatatccagcttacctgggcatccttcttagaaaggtaatggagattggggcataagaagaaagaaaatatcttttgaatgtgcaggattttcaagagagaaaaaaaaaatatgctagggaaagaaattaaggcagaactgatagtgttagaaaaggtacacttgaattttttgttttaaaatagttcaagttcagataataatttgccatcttcaactttagcacttgaactaaaataccgctttagcactttaacctgtagcataaaaacaatttaacaaaacaactttggcagattctgcttagttgcctgtggtttctagctgggtttcctgcaattgcctggcagttcctctctgttctgaccagatttctgggtaactggcctcycttcccctctgggattcatgaatcctgtctaccaggagttatcacacaaacagttagttttagaccaatcattggttgtaaatatatgttttaaatataaaagcaatattgtacaattatgttacctacagtttttagaataatgaaaacattcttaaaaatactgataattcagctagtataacatgaacaagtgtatcattttggtttataaattatttaatcgattcaaaataatatgacttttccataattgtaagtagagttaacacaaaacattgtcctactttctcatccaaacatttttataagacaagtattaggttggtgtaaaagtaattgcagttttttgcaattacttttaatggcaaaaactgaaattatgtttgtaccaacccaatcaatatttccctttttttctttttctttctttttttttatttttttcttttgagatggagtctcgctctgtcgcccaggctggagtgcaagtggtgcgatctcagctcactgcaagctccgcctcccgggtttacgccattttcctgcctcagcctcccgagtagctgggactacaggtgcctgccaccaygcccggctaattttttgtatttttagtagagacggggtttcaccgtgttaggatggtctcaatctcctgacctcgtgatccacccgccttggccttccaaagtgctgggattacaggtgtgagctgccatgcccggccttcccctttttttctaaaatacttttacgtataacttttttggatgcctaattttggtctagtaactacaccatattgtatgaaacatctctcttatgattagagttttaggttctttcatctttgttttttttctctctttttctagttattaaaaataatatagtgatgaaggactctctttatacacataaagatgtattgcttaaaattacttatgtgagataggttcccagaaataatcagatatatcttcttagataaaataaacaacttggttacatgcctggaaaataataatagaaatatataaacaatatgtctataagcaattaaaggtgtatcaatatgtatagacccagcttaggtattctttcttactgaaatctcctgatctcactatatgtatttctttctttctaaacttccgaagtctaaggtctggtccttttttctttcactccagatcttatttatctctcagtctgttggagaggattccactttcctaatcttcatgttttgttcacctatttattgagttctttgctctatatctagaaaaactcctgaatgctatccgatgattcctttcttggacccaagagtcatttgttcaaaatgttatttgaacatctctgcagtaagtatagttgttcatcagggacaaataatgttgcacattaaaatcttgtctccttatgtattgtgttctaatgtctcaagctactgtaacaaatctcaaagtggggtgacacgtttaggcaaacaaagagcctaaaaacgtatgaacagccaatagaaacaggaaattcaaagtcaatgtgcagccttctgtgattcatcagttcaccaggtaagatcttggataaaaaaaaaaatcatcccattgttcacacagtctctagcagaatgtgggtaggcacttaataacattacaatgcagtttgaattcttgaaaccctgcaaagcatttatgagttaaatgttagagcactaggatgcaccattcsatagaacaatagtaaaactggcagaactgtttttcatatgtcaattaagactgmactccggagaccattaaggaaaaggatgctgctattccccgcagttaaaggaaatctattgtgtttcctttggtctagatatataagttctgcagaaaatgtctttcagtaggttaggatctgctaagatttgatcctaaattatttttcagatagagataataaaatcataagaagaaacactttggattctaatggagtgagtttgagttctggccatattcaattgtgtgtcgatggacaaattaacctcatacttacatcgtacttacgtcgtggaattattgaggggattaaatgagatgatgtatgtataatgcttagcattatacttggcgcaaagttggtactcaataagtgttaatacttattagtatgatgattttgttaatttgatgacaaaaggggatgaattgtgttaaaatcagcaaatattgaagaaccaacctaaaggtttttcctcactagattatcagctacatgaaggcaagtatgtgttgtcttttaaaaaattattgtttctacaatacataattcttgagttatagaaggcactcaatgaaggaagagaatgaatgaatgaatgaacaaattcctaacttgtgtctgtctcttggcctttgagtatataggtattttcacagccataggaaaatcagatgctataataataattctactagctttctgacataaatcttttaatttccttcttaggaggctagttcacataaataaaacactagaaaaggaaaatagctcttcctggttctgtaagttcaaaaaataaccaatttcttaatatggcagtaattccttgtatgactagctgggctgggactgagaccaaggaccttgacactaatgggccgtttatgaaatttacatagcctgaagtcatcctatcggaatgtccttagtaaccatcaccattgttacagaaaagaattgggaggctttttctttcttgcaatgatttctttagtttttttatgttgtgggtcctatggttgagatcatggtttgggtatttacataagagcaaacagtcctagaagtatgtaataatttctaatgcagctccttggtaaaaagaatgcaacaaatgacacagatctacagcacaacattagaaaaggcgcagattaaatttgaaacaagagcaacctagtgcaaataaaacccttcaggtagcagctttttggagataatcaaatccgtttttagacttccacattttcctaactttatgccctccataaggatgtgatttctgatatgcgtttgtgtgcttttacttgttggtgacttttgaaagaagtcagccctggaatgtagttgccttgcaaaaaaattcaagggaatattttgtaggttttgctgtctatgccttggaagcaaacaaattatggtacaggactggaactttacctacttgttaattggcaggttaaacttttatgagtttctggtaccctggcgatacatgactattaaaatttgcaggtggttcaaggggagagagatgtaagttcctgtgctagtaatatatcataaaagtgtgtatttcatgtgcctgttgtgaaaatggagactttaatactctttcacagtataagctgattaaggaatctttatggatctcattaacgatgggcctttttttcacagaaagtgaaaagtgtaatgcttatagacaagcatagaagaaaataattagcttggtagtgcctctttgagactgagtttagagcaccctctgcattcccttcccaaccctcagaagctgcccttgtctcagaaattgcttctaccacatgaaatactgtaaatctgtcattttatttttactttcaaaagaccgtgtttgcttaattttacttacatttaatagatggtatgtttcctttttcgagtccatgttttcattaggaaatacaaagacatatactgtggctagtgatgtgattccacataatgaactaaattttggaaaaagtgataaggggattgtagttctttggaaactctattttcttatattttacatgtaatcttaggatggaaagctcctcaaatattggctaaattaaacatttgcccgaaaatcttagaagtagatctttgtatccaggagcatagcttgttttagcatagagaaatagtgatatgaattagctttaactaagaaaagggtagtaaagtgaacaatagaaagtattcgttttattttaaatttttagtccataatttttctttacccrtttttttttggagaatttctgtytgtttctcttagtatcatcataatcttaatatagcacttttggaacactagattgtgatttagtttcttcactctcttggtaaatatataatgtagtttgaaggtacttcatccattggcacttgttgaaaaattcattctttagaaatggttattttctaaattggtttaacctatggtcagggtgatggagcagcaagggaggtgggaytgcatggggccaggggatggagagacttagggacaagatgagtgtgtcatggagaagctgaggaccacaggaaggcattggcaatggacataatgaagaaagaagtaatgctggatgaacaatcctgttgggcttttagctctgacatcagtcataaaaattttgtctcccaaattggttgccaagaacctatagttctttgtttcaacaaagaatgttttctgagcrtgacaattgtgtgcatataattgtatatgataataagtatatatacacacactatttacatgttatatacatacatacactgataatgtactatattttaataaagacttgaatgacctttatggcttttgttaaattagctttgtttttaaaatctcattttaaaatgtgagacagtagtacatacagtagagttgacaggaatgtatttccttatttttaaaggatatattgtgtcaggaaagaagaatcatcaactcttttgacccagtgagatttaagaaggtgggaatagagacttttataaragtttctgcctaaatatttttttaaattgtgtatgtactccaaatgatattcttatcaagtcttatgattaatatagctttacaaataattcaccattttaatgagggttgtgagaagcaagctcaatgttataggaaagaagtaaaaaaaatagccttatagaattataatcgtcaaggaagtatttgggaatcaaagcctagttttggaaatcatttcttgccaagtgaaaaggtgctaagcttctcagcaagaagtcatttgtagcacaggcttgtctgtcagtgtttgggaggtgctaataagcaaataagcccagagttccagcctgagtatttggtacatccatggagtgctggtgggtatcttaccttagggaaagctgcaagtcagtccacaagatttactggagacctactttctatatatagatagtccccgatgtttgatggtttgacgtaagatttttttgactttacggtggtacaaaagtaatacaccttcagcagaaatcaaactgcaaatacacaatcattctgtgtttcatttttagtacagtattcaataaattacatgaaatattagacttcttttctttttttgagatggagtcttgctctgtcactcaggctggagtgcagtggcgtgattttggctcactgcagcctccgcctactgggttcaagcgatcctcctgcctcagcctcgcatgtagctggggctacaggtgtacaccatcacacctggctaatttttttgtatttttagtagaggtggggtttcaccatgttagccaagatggtcttgatctcctgacctcgtgatctgcctgccttggcctcccaaagtgctgggattacaggcgtaagccactgtgcccagctagctttttaaaaaatagtctttgtgttagatgattttgcccaaatgtaggctaatgtaagttttctgaagaaatttaaggtagastaggcaaagctatgatgttcacagtaggtttggtgtactaaatgtaatttcaacttgcyttttttttttttttttttttttttatcagacagggtctcactctgttgcctaggctggagtgcagtggcatgttctcacctcactgcatcctccacctcccgggttcaggtgattcttctgcctcagcctcctgagtagctgggactacaggtgtgcaccactatgcccagctaatgtttgtatttttttggtagagaaggggtttcactgtgttggccaggctggtcttgaactcctgacctcaaatgatccgcttgccttagcctcccaaagtgctgggattacaggtgtgagccactgcgcccagcctcaacttgctgtattttcaatgtatgatgggcttatagggttataaccccatcctaagtggaggagcatctgtgtaggtcttttactaggtgcctgtctgggagaaaatgttatttaagaataggttataaggatttgttttttcttgcacattctttattttctagccagagtagataaataaacaaacaatatatagctcactgaaaaaactataataacaaaaaagtcaaaactacgatggaatgtatcaatcagaggagaaaacagaggcaaaggtttcaggaaaggaaggcttcccacagtactataagggatggtattagtgattgcttgcacctttgttcgtcagctttgtgctatatgccttataaatcatttatttttaccatttagtgccataggaatcctatgatgaagacacgatcatactcctgttagatgaggatccggcagttcagatgtgtgaagtaacttgctggccgttgcatcactaagggactcacgctcagttgtgatttgcttcaaagcctgatctctttattacatggcagaaaacaaagtgaatgttattcataataaaaagtatatgccacatgcaacagggactcatatctccagttttcttagttcaactgtgaggtaaaaattatgtaaaaattagaagaaaaggccgtctagcaaaggaagactcttcatctaatgaaaacttgaaaaarttaaaacaatagtgtaatgaaatggattatttattttttaaaattcaaaattaaatgaatattgattttaaaaactttagaaattagtggaatatgaaacaattcaaactacattagaaacaagtgccagtcaaggttttaaaatatgtccatctttagattaactaattaaaaatgttttagcttaagtaaattgtaaaatttctctgtcaaggatgtctacctactaaaatttcatttaaaggcattcattagttttagctaccaactaaataggaaagttttcatcgcaatttgaagggtatgcaaaataataatatgtaatttcctatagatatttttgttatgaattggtatttgctgcaatgatatcaaaaaaggaaagtagagcagaaggaagcccagacgtctcagttttaatttgaggaaagagtatgtgataagtataatataccactggttctctaggttccattaaaagactgtaaagagaaagaaaagaattctttggaactaatgattccaatctggagtctatctctggatccctaaggattcaccaacttaaacattagtttccttgttgatatttttgaagtcctaatgttaatacctttcccccacttaaagatacacaagacttaagacttaaactgttgagcattttcactgtttattactacatcaacagtatgataacattgtctctcctatatgtcggaagctctgatttgccattatatgtgtctttgtttataaataatatgaaactatataattcttactttatacaatttgcttggtagacaaaatttttgaattaattgtatacatagaggaatagataataaaagggtatattgaaaaggctgggaatcactattctgtatactgtacttagaatttaggtgagtaaaatgacctcatacatcattgcaagactgaggctggtgttttttgctgcctaaaactaaagatatttagcatttgggcattagctaataatgattaactctgtggtaggtgctatatctttgtgttaaggtaaacatactttaatatttgggacttttccttgaatattgtataagccagttatgataagagatttaagtgaaagtgctaataaactcccttcagactcagaccacacatgagaaacttcccctcagaaggaaattagaaggccagagggaagaaattataagtaaatgaacggcgttttaaaactgaggtgctgtaactagaatgctgctaagatattaaagtacttagacatttaaaagacatggttatttatatttaatttcaaaatgtatttaagtgaaaatttgaaaaatatttgagataagcagaactttcagatttttttttcattttgttaaaggaaatatcctactttcatgtattttgcaaagatgtcacaatgatattgaccattatattacctgatgtccattaaaggacaaaaaaagacaaaaagtaactttaatgttttttcttatcaaataataggagacatgtctgctccttactcatccttccttttttttttttgcattggctggcaggaaattaaatttagtattcagttgaggtaaataacttatctcagcctaactacaaggacatacctttcactatgcattttatttgaattttaattcagtaacgtaagtatttagttatatttgctgtctaaaatgccttttagatatttgtaacaaataaattataagtaaacaagtgacctctgagatataaattttttacatcttgctatttccaagttacattgcctgttcttattgaataaacaggttggcagaatattaagaatatcaatgtttacttctaaatacagaaaaacattgtaatggtaggcacaaacgcttcttagaagaaattaagaatgaatataacttaagaagaaaggctctttgttatttttgaagactatcctggttgactttacatttaatggggaagcagaggatgtttgatatttttacctcaactttttttcctcctcttcctttttgtagagaatactcttacttgaaaccctttgtatttggtcctcattctctgctttccgtggcttcctacctcgcctatttgttctatggcctgtgtgcctctttcttttctctttgttagttcctcacccttcttctcattgtgttcccaaatattttcccgaattttacagatgagaaagctgatactcagcggcattaagtagcttgacagagtttacacagctgctaattggtcaaaactgaggtgagaactctaatcctctccctcctggtacactgctctttctaatggcgttacttatagtagaacacgatgctgatagactgtgatgtagttctcgatggcttaaagtgtatgtgtttttctgtgtaaactagaacccatggggctgatgttaagccagttcacactggtacaactgcgctagttttaaaaatactgaaatatttccacattggctaattggtagctactgttaggagcctctcagctgtacctcttccttctttagaggcctttagtgaatccatcaggaacctcacaacttggtccagtggcaatcaaagagaggcatttagctacccatagttggataagatgattagtgtaatacttcatgtttttataaagagcaacgctctctaacataattatctttttggtctgcttttttctcatgataataatgagagggaaaatttattctgctcaaagaatgatgatttcaggttttgctggtttttgttttttaaaaacttcatgtggtgaaacgtgcytgaacagtatatgagaatgttatgatgcagtatcaaggttttctagcccctgtgttcacttaaaattttgcaagtgtagttccttttagagatcatttaaacattttaattctgaaataactgagtatctatatatgttttgcagatttcaagtatgggattactattgttatatctttactgtattcttgctcttttttttagttatagggaattgcactgactgattttcaaatgctaaatcatctatgcatttttttgtgataaacttcacttggtcatgatgtattatccttttaatatattattggattggagttgctaaaattttatttagaatttttgcagccaggctcagtgactcacgcctgtaatcccaaaactttgtgaggccaaggtgggcggatcacctgaggtcaggagtttgagaccagcctgaccatcatcatggtgaaagcacatctctactaaaaatacaaaattagccgggcatggtggcgcatgcctgtaatcccagctactcaggaggctgaggcaggaaaatcgcttgaacccgggaggcagaggttgcagtgagccgagatcgtgccattatactccagcctgggcaacaagagcaaaactccatctcaaaaaaaaacaaaaaacaacaacaaaaaaagaattttacatctatgttcatgaaggagattactattttctgtagtttttttgtaatatctttgtcaggttttgattattagagtaatacctcattggggttaggtagtattacctcctcttcatttttctggaggagctgtgtagaattggtattatattttctttaatcattttatagaatttgcaagtgaagtcatcaggcctcgtattttctctgtgggaaggtgttttgccaaatatttaatgtctataacagatatagggctgttacggttatttatttcttcttgagtaagctttgatagggtttttcaaagagtttgtcctcttcaagttcttcaattcaattgaaaaaaattgtttataatattaccttattatcttcataatatctatagaatttgtagtaattaatgtcacctttggatctccttttttgccagtattttaaataagtggacccactgtctccttgcctatactgtttcctaagaaatactagctgtcattcatattttgtctctttgtgtgtgatttttcttttactgtaaatttgtaaaataatttctcttcagttttggttttgagtatttgattatggtgtattttggtcaagttttctttatgcttcttgtgcttggggttcgctgagatttttggatgggtgagtttatagatttcattaaatttagatatccttcaaatatttttccatcccttgcctttggtgactccagttacgaatatattagactgcctaaagctatcccagggcccactgactttttattatctaattttctatctgtgctttcttttgggtaatttccattgctatgccttcacatttactaatcttttcttctgcattgtctcctctgccgtttagcctatccattgtatattttaatctcatatattgtagttttcactctagaagttcaacttccatcttttttatatcttctgtatttccacttaacgttttaaacatgtaattacagtttcaataactgtcttaatatctttgtctgctattaacatctgtttcagtgctggatcattttcaattcgttggcttttctcctcactatgggtcatatttttctgctttttaacaatcctgataattttttttggaaaccagtcattgtgagttttaacttcttgggtgctagatattttcatactcctatgaatcttagtttgttttggggtgcagttaagttacttataaacagttttatcctcttgagtgttgtttttgagatttatcaggactaatgcagtgtttagtttttgactaattattttctagtactgatacaacacacttctggatactctactgaatacagtttccattatgaagttttctagcatggctggtaggaacagcattcttcctggcctgtgtgagtgctggtcgctgttagctttaggcctctcaggtggtactttctcttgcctcaaatagttcccatacatatatgtattaatttgcactctgctgaatagttaatagagatcttttatagatttttagagttctgtgcctgttcagccctcttgtctctggtgctctatccagaaaactctaactgctttattgtccctgaaatctcagctctgtttcctcaagtctggatggatgtccaccacgctcccccggactctccctccctatgccatcatatagaaatgctctcttggcaacaactttgcacaatcatagagctcaccacctttgtttctcatctctcaggattgctatcctttgatggctcaagtctagaatcttgaaaaccgttgctcagcttttggttttgttcgcttcagggttttagttgtttcaggcagaagggtaaattcaattcctgctactacaagttgaaggcagaacttccttgacacttcatgcagagttgaagtgggaagacttttagacttaactaccaaagtgtccacttcagagagtaaaactcaagagaataaatcctagtattttttctattgaatacacctttatatttacttttttcttttcagaaaataaaaacttgcctttttttaaaaattggaaaagtatacaaaccaaaaaaaaaaaaaaaaaactacagctacacgaacacttaaagtttttaaaaataagataatgaaatagtatgattgtgggtaatttaatagattgtggaagtgttttccaaagtcacatgaaagtatgggtacttacctttaaggatgattttaccaggccacagaacaatgagaattaggaagtttttcacaaaactaaatttattcaatttaaaggactttattttttactttgtcattcttattagtgataaaattttatgcttaattgaattttaatatgaaagctgatgaatcgtaagaatttttttttaatatgatagctgatggattataagagttttgttttttttcttttcattcattaactggcaaaagtacaagagggggtgcatgctatgtggagtccccataacatttttgtactccaatagtctggaaacaactgtttgtatacgctcaaatactttacccatttttattcaaagattgattacctaagactattcagagaagtaatgtttgtttgtttctttgttttgtttttgagcatctgccctgtacaactcatagaatctttagggacaatggcacatgtctgaatggctaacttgtgtcatctttatatgtccttttctttacaccatatagaagatatggaaatcaattatttcrttaatacttamaagcactatttggagatgtatttttaattttcattgtttcctaatattatttctttctattgtatgacaaggaaacaggaattgatttggttcctgccctctttgtcatgaacatatgaccaatgagaaaaaatgcctttttaactatgatattaataataaatatgtgtcaattattgatgtattaagtrtatcattcagtacttatagaaattatttgaagtagccacaattattattcttttacaaatgaagaaattgaggcttaaagagttaagtaactgctcaaggtttcacagcaaatgtaaagccatatatgagacccccgtttgagtcaggcaaagactgtgctccatctactgcctccaagtgagaagataagttttagtgttttccactaagcatttcctggcagtatttctctccagacgctattcacaatctccaaagaggagaaacgactctattctatgcacaatttattactccggttattatacagaactctttatttaaaggggagaatgataaattacactcttgttgaaataagccttgtagacctttgaagaggrttggaaaccaaaggaaacagacattccagaagtgtgacccattttttttttaataaatcttttcttttgcttaagatctcctaaaatatttccatttttataaaagccttctggtttctttgtgaaaatagctgcaaggatatgtcactgggtaggttcattaaaaattacaagcatacaccattactatgaaaagctcctatagcctgtttcctgcacattgggaagagtgcagctttccagcgatggtagcccatgaatctcggaggcctgcacctgcagattacagactcaggtacaggcactatgagaatagcccctgttttgtaaaaacaaaaagctctgctagtctatagaaattgttgggaaagagaagcggacctgtgtgagataaacaaaactcataaaccactgagattagataaattgttagagttgtttggaaggccaggcaggaacaaacattgtcttcctaaatgtagttttcctgcacttgggacaagcgtactatctgattaccccagatgatttatttatccttctagactgttgacatgaagtctgcatttcaggcctaggaataggtgtactttctgcagttattttgtttgcagaaatcactgacttctctcatgttactttttgtgattgctagaggtaacgatatcaaagttcaatgtgctcagcttgtctgtaatagtaaaatcttagtaaatcactctaggtttgaaggataggccctggtataataatataacaataaacagagttcctgttctctttatggttttagttacagcattgtatcagtgatacttcagtttcttcttgataaagatttttcatatttaaaactcataaaattcatgctgcagggtaagtaaagtcttctgaaagcatacattcatttacttgtttattcactgactccataaatttttattaagtacccaatttctggcagacattcttgtggatcatgcagactcagtggtgagaagaaaaataatatccctgatcttacagaactcattttttaattgggggaggggcttaaataaaaggtgaataaaccaaacaagaaaatatcaggtagtgatactacccagaagaaagtaaaacaaaatgaagcaattaagtgtgcttggacacctgctttagattgtgtggtcaaggatggcccctccaaggactagcgtgtaagctgatacttgaatgagaaacaggctgccatgcaaagatctgctggaagaacattccaggcagaagtaacagctcatgcaaagatatagcataatgagggcatgcctagacatgcatcataatgccttaccttgtaccttgatttgctttcatttttaccatttaaaattctgcttctgtactatgtcctacctccccttacccttcattatccttaaaattgtgtattcttaatgaaaactatattgttaggtgaccatagaaatattgttattttagatagttgattctgtagtgttttcaagaaattatttcatatttagaataattttgcaaagtgagttagtttaaaagtagttctttaagaaacaggtaaatttcaaaacacttctttccaaaatcttttatctcaaaacttgcattaaaatgagaaaatatgacatctcttaaaaacagaaaaaaggaaggaagggggaagggagggagggatggaaggagaaagggagggagggaagaaaagaaggaaggaaaggaaaggaaggaaagggaaagagaaaagggagaaagagaaagaaagaaagaatgaaaaaatgaaaagaaagaaaaggaaaaggaagaaaagaaagaaatagaataaaacagaaagaacacarttatttttatgtctggaaagatacagggaactttttcccaaatgaggtaactttgaagctgggagacagattcacacgttcataaagtgaaacttccagggcataatttcctaaattatttctttcactgccctcttggtagctcagtgtcacggatgagtgagtttacctcacaagtaagcatttagctcccccaaaacagtctcttaaccttagctcaccacgtgattagactcagggtgaatgcacaagattaatgagagccctgagtgaaaacagtctcttgtaaggacagcactaaatcttgaaaggctggtggttattgtttgtggaagctgagccctggactaatcccagaagggatcatggtggtggtgactcctaatctgggtatatctttcgggcttgatcatgtttttctgtgactgccattgtgtgtctgttggaatctatttttaggagccactgcatatccttgtgttttcttgctgtgcctaaatgtagatccttctattctacttttactccatttattttccaratgatataaagaggacatattctcacatctggaagttaatgccttggttctagtttattctccctccaagcacactaaagactttttcatttcctagcatcggtcttctagtggccaataaaatggcaagaaaagagttgggaaattcttccctttctcctcagtttccccttattttgttgcttcatttaatcctattctatttcagtaaaggaaacacggtctagttattgcaagggagaaagactagaaaggagaagatattggcaactagcaatcagccaagcaatagcaacaagagattcaatattgtcaggtgaggtagcctggttggagaatgcatatgccaattacaaatcgatcataaacaaatacttatacgcatgcagaaaatcctaatctattccactttgcccagtttctgtccatggactaatagtggtggtctctaaagagcactctattaggcaagaatgaggcattgattttataaaacagaatcttcaaaggagggggaagccaggcctgtggggaaagaaagcagaagtctggcaataggtcatgggaaaggaaggaatcactgtggggtttggacttggagagaaaaagtagcagcaggtcacaggccaacctgtcattagctttaagacacacacacgcgcacacacacacacacacacacacacacacacacagccactgcttacctcagaatggattgggttaaaggttatttttttcccctctcaagactggtttcctatcttaagtttatgttaataattttactgcttctttacagtcctaagtttgcatatggagaggttaggtctcaaaactttcaatctcatagtccaaggtatgcccttaaagtgtaatgtggaaagggttctctttggctacacatgcatcagttttctatcaaaagttattttatagcagactgctattgggtaattgagatgcactttactaaaaatataacaggtttaaactagtggattttattaatacttgtttttgtttttacagtccaattacctagaacactatggtttattcagaacaggtatcttttgtttttatttcaaaaagtacattgattatttttatgaatgtttaaaatttaacagctttctatgcttttgcagagtgaaaatttcaacaaataattttttatttgctgtgattcttttgtaaccatagatattttttatttaagcgaggctatgtatatagtttaagactttgagaaaatcagtaaacctaatttatttctttgacaatattaaaagagcttagtttctggtattagaaataccatcaagacagggctttattcataaaatattacaagatgcttaaagyagtggcttaaaagaatagatttaacgaagcactattttcattttctataggtctgtaaaatattatccccacaacatagtgacataaaacacaactaattatttgctcatggttctgcattttggacagtatttaccagaatggtggtctctgctctcatggcatttagtggaggcttgggctgacaggcctaaggtggcctttcattcttcagggccattccccacatggcctcctagcatttgtagtcccaagctctttacatggagaatggatcccaagagagcaaaagtagaaagtgccaggcctcttataggctagatctgtttaaaggcttggctcagagtgggcacagtaccacttatattgcattatatgggccaaagcaagtcacagtgccagaccagattcacagcaagggaaagtggacttcacagttttttgggatgaattgttcacatttataaggagggaaggaactgttggctgccatatttggagactctagcccaaccttttaacaaatattttgaatagaaggagaaaccttcttaattatgaaggtagttttgatacatatcacctataaatatgcagtaattttatattcactcctaatcttgtaatatgagtttgtttccttgatttggagctatgacattccacgttactgatctttagtctgacaaaaaagagcttgacttctcattcaagtcaatttccaaatgtttactgttacacacttggcaatcaactgagttatttttgaaaacatccccttcaccagtgtagtgaaaagaatatagaggcaaacagatttaggttcaaataccaatcctgcatcttactgactgtggacatttgggcaagttattttaaatgttggggagtaattttactcatttgtataatgaaaataattatacctacttcatcaggatgctatgaagatgaaataaaataattataggacagtcactggacactatactggagggctcatttttcacagttctttatttttactttatataatgacaacagtgctcagaagtggaagtcatgtagtagtatttttgtttgcctttatggctattatgtgattatatgacttttacaacaaaaaaatctaatgagatattcttcttctattaggttttaataattaaaataggctgggcgcagtggctcatgcctgtaatcccaacattttgggtggctgaggcagacagatcacctgaggtcaggagtttgaggccagccaggccaacctggtgaaaccctgtctctactaaaaatgcaaaaaaatcagctgggcgtgatggcacgtgcccagctactctggaggctgagggaggagaatcacttgaatccagacagtggagtttgcagtgagccaagatatcaccactgcactccagcctgggcaacagagcgagactatatctcaattaaataataataattaaaataatagtaataagaatatgttttatgatttcctagttcagaatattctattattgtatattcaaattgcacattactgatgtgttttgtgtcaaagatatttgtgggttacctaggagaggtatatgaaaatatttttattattaattttaatcttgaggtgtagtacaccaatttttttcttgtcataaaatagcatgcagcaagttgaaccttggctttttctgaagttaattggacagaatttgcagacagcttgcaggattgtgtccaagtagattttaaaatttcagaaaaatgcaaaattatcattaacaaaattattatcgcagacaatttcatccaagtagatatagaaatagttgtaaaatgccagtttgcatctgagatgtatcacaatgacactgttttcakagttgaataagaaataagactattcaacaagtactcatgtcaccatgaaagagaaaaatgcagagctgaaggtggcatgacacattttcccattcacagctgagtgggcaggtgacgcgtgttagggagagagctgctatctgatattccactgatgaagcttgtcaactaaattgtatttggagttttcaaaatatcagagtggatgaagtctttggcatattttaacatttaactaagtcttacacatggctccagaggaggatcttccttcgccagttaatactaaattaccagtgctttggcaggaagcagaaagtgccatgtgggtagtggattctggagagttagcattgaaatactcactgtacattacatttatagaaaagattgagaggaaatttcttcctagcaggcttcgtgcaaggtttgggccctttctagaacgaactgcaagtccctttaacaatatccctgtgatctatgcatataggtgagatcatcatatgtcttagaacaggtttgttttgtccttcagaaattataccccttgtgatcaagtccagcctgccttttgccaagccagaagatattttttaactttgggaggacacaacagaagagagatttgttttcactttggacatgactgagtagttgcaggctctcagtggggaatagactcttcataacattagcacagtgatatacggacacacaattgcggaaatgcagatgcagtgttttcatttgatttttggtatagtgtttcttctgaataaatcaagcataattatgagccacatgtgactaaatcagatagagtaattccagggaattggttgatatatatcaagagctttaggagagaaatgttcgtggtttatgtttattattttttgttcatagcaatctctgaaagcagctgctatgcaagtcatttgtcattcttttccactaagtgccagtttgccaagtgagctttcatgtaagtggcggcgtttatgcaaatgctaatgcagtttttaatcttagaagcaaagaacctgaatattttgctaacatacaataacaatgatacttaatattaaatagcagcttttatccagggatagctatataatttacaattgaattggcgcaaattatttacatacattgagggcattgggttaccatatttagatcatagtttatctgatgtatgaacacactgaaaggaaatgtgaaatttgtattcagcatcttcaaagagtagaaaatgactacctcaggcatctaatagccaaaaagtttagtcacactcatacacaccatcttgaaattgcttttatttaccactctcatccttgtttcaagtctagttttatactttatgaatctgcaaatgattgcctttattgaaaggtttgtgttattcaagatgacttgtaaagtttactcaatcttccctagcaagggaaacaggaaattccagagaacactagactcagcaaacctataaaatctgagaaagcagaccattatttctggagacatttcacataacactttgggaagcaatgactaattagtttttggtcttaacaatagcactttcaggggctgttttctttctttttttttctttttatagctttcatattaggaaaagaagaaagtagctctgaatgatgaaatattggcaatgtatgcacttgcttctctgtaggagctcaactctttgatccttcatacaattaacttcattgcctagctggtattaaccggctggagagtaacaaccaattgttgcaggcacaacaacaccctaatatgctttgcctttaatgactgactgtttcaaattgaaagctctgttctctctattcctaaattcctgttgaagtaagttaagtccttaaataagtataggtactcattcacacctacagccttatcttttttgtggcaccttacccagtccccaattgccagagaatacttggtcattagcaggggtaagatgtattctgggttctctagacctaaacatttgaatgttaggtctccttgcttgcttttatttctttattttttttttacctccttacttatttagtcattcattcattttagaatttgacttccatatgtctaaacacaagcagcctcccttgactcctcttccctctcccaatccacaatcaatctatctttgaatcctatctgctccacctctaccataatcctgctgatcctggcctccaccatggctcttgrattattacagtaaccttctcattgatctccttggttttgtccttaatccccttcccctccacctctcatcgcccaccctggacacagtttctttcttcttctttttttttttttaaatattttcttttattgtggcaagaacacttaagagggtgagacccaccctcttaacagatttttaaatgtataatactgtattgttatctgtaggaataatgttgtacagcagctcttttagaaattattcaccgtgcataactgaaattttatacccattgattagcaactccccatgctctcccctagatcctggaatcactattctgttctttgcttttgtgagtttgactgttttagttacctcatgtaagtggaatcatgcagtatgtgtccttctgtgactagtttatttcacttagcataatgtcctcaagttccattcattttgtcgcatatggcaggacttccatttttttaaggctgaataatattccttttatatgtataccacattttaaaaatgtacattcatctgtcagtgtacatttatattttcaatttttttataaatactctaagtgggattgctggattgtatgatagttttaattttaactttttgaggaacctctaccgtttttcatagcagttgcaccattttgtatttccactaacagtgtgcaacaaactgaaaagcttctacacagcaaaggaaataatcaacagagtgaaaaggcaacctagaaaaatggaagaaaatatttgtaaactaagctaaacatctaataaatggttaatttccaaaattacaatgcaacagtaagaaaattaataatctcatttaaaaatgggctaaaggtttgcagggatatttctccaaagaagacatacacatgaccaacaggtatatgaaaagatgctctatgtcactaatcatcaggggaatgcaagttaaaaccacagtgaaatatcactttatacctgttaggatggctaacctcaaaacaaacaaacaaaaacaaaagagaactgttgacaaggatgtggagacattggagccctggtttatcctaaacccagcagccccagtgagcttttagaagtcataccatgtctcttctctgctcagaaccctccagtagcttcccatctgcctcagagtaaaagcaaaaatgctttccagggcccaccagaatctgtggctcccctcactctgattcatctcctaccactctttcctaccatgctggccttgctgcaccatccacatgctgagcacacaccacattggtgcctttgcatttgctgatcccagtgcttagagagttcatctccagatatctgtgtagctcctcgcctcacgtcttcagatctgtgctcaattgtcaccttctcagagaagtttttcagatcaccctgtagaaaatagcaatcctacccacctccaacctacggcaccctccttttccccttaccctgctttctccacagtccttatcaccaactagcaaggcttgttgttttgttacttgcaatcgatctcccccattagaacatacagttcacagaggcagagaatttgttttggaactgctgtattcctagcgcctagaccaaatgtctaccatgatatgaattaggagttcaacaaatccctacttcatactagttgaatgaaaaaattaaataataagtgagtaggaattaatgcctctactttcttctcatgttctttcttttatcttaccctccccactgccacctttctacattgtgccaagttctcatgtctcaagaatgtggtgttttgttccttgttagctgtaaatgtaatactccttmacccatttttatagaaaagttaactttcccctggatgcttgggcttcatcatttaatgtcctcaattgcagatggctatccataagtttgactctgtgtgtgtgtatttgtgtgtgtgtgtgtckgtgtgtgtgtgtgtgtatgtattttaaacttgtctttaccttttagtgtttgcagtaaaaacaaaggagattatagattacgtgtttttggtaaaattttttcatgttgttgcaagtcattcaagaatgaatgcaaagcataaagtttaaacttggagaggcagaaattcaaaatttctttgaaacgaatcatcgaattcctatgctatttagatacacttccattgagtagagagctgacaaagaatacacatttttctcagtggactgaattcttctttaaattaatttgtcagtatttgattgaaatactaaagcaattcatttcagttacattcaaccagcattgcctaagggactacaatgtaaactaatgttaataatttataaataccacttgggtgtcaagaactcttacaggcatttcatacattaggtatttaatatttgaaatttataatagttctataagataaagaatatcatccttttttgatattaggactttgaggcttccaagaggttagtttgccaaaatatacaaagtacgcaaagccaggaatgccaaagcttggaaattgacccaatttgaatttatagcttgaacttgttctcctagactagtgtttttcaaactgtggaccacaacctacagtaattgaatgattttttttggcgatggtgtcttgctctattgcccaggctggagtgcattagcaaaattatagctcactacagcctcaaactcctgggccgaagtgatcctcccacctcagtctcctgagtagatgggaccacaagtacgtgctacaacacctggctaattttttaattttttgtagagatagagtcttgctatattgtccaggctggtgtcaaactcctggcttcaagtgattttccatccttggcctcccaaagtgctaggattataggtgtgagtcattgttcctcacctcaaattctaaattataattatctacacacatacaaataattgaagcgaaagtttcattaagtaaaaccctcaccaggctgggcatggtggttcatacctgtaatccctgcactttgtgaggccaagatgggtagattgcttgtggccagtagttggagaccagcctggccaacatggctaaaccctgtctttactaaaatacaaaaaaaaaaatagtcagatgtggcagcacatgcctgtaatcccagctacttgggaagctgaggcatgagaatcacttaaacccgggaggtggaggttgcggtgagctgagattgtgccagtgccctccatcctggacaacagagtgagactatctaaacaaaccaaaccaaaccaaacaaaacaaaactaaaccttaccctatgtaacacactgatattttctattctgttccagactaatctcatctagcctacacttgccatgccttgcattgcttatcctatcttgtcctgtcctgtcctgtcctgtcctgtcctgtcctgtccagtccagtcctgtcccattcctactcagcccatcccatctcagaacccactaaattggccttgtgatgcacctactgttccatacagtttctatatgcttgaaacactgtggatacaaaataggaaaaaattaaatagtaaggaacttacagataaatgaaaattaatcgttagatatggtaatgatgcgaaataatatattaaatgttaaagccctttgactcttttacttctatcagggcctgaaaataggagatattccttgaatcactcctctcagatactttcaagggtcccggcctgatgaagtcatgagaactagggaaacgactgccataatgtagtcacatcatgcctgtgtaacttttccatttattttttcttcgtccgtgacatgaattttgataccaaccaaaatctgttatactttaattttacaggggtttaatgcatgtgtattatttccccaacaaccctgaggacttcaattcaaggaatagccaaataagatagctgtaaatgagagggctcccaggcaatacatcattcctgatgcaaatatcattgctactaacattattattatcctattatacccccatgatgccttaaaaagtaaatattagataaatacatactggattgatgaatgagggacttatatgctactttcaataaatacgtaaaatacgattgtgggtatgactgtgaatttcatatcaattccttcagactcaaacattaatttttttgtctattgtaagaaaaatcacgaagtcagtttattcagcatttattgagaacttggtatctgtagaaagaacactgtgttgagtactattttcattgcctacatgagaaagtcagaattccagaatgtgtcctttttacctcttcaaacgcatcttctgcaccttcctcctcacatccttctgggcaagtactggttgaagtgtcctgaataaaacaggtatccatgcctttgtgccttagcccagctgtttagccctatttgtctgacaaattcaatcatggctttcaaaatctctatcaatcaaatgttgctttcttcctccaagttaagagttgcacctccatccacctatccatctatccactcaacaaatgcttattaagtacctactacgctccagctctgaactgattgggaagctctgaactatctgccattgggaagcatttctttttagctctgggtacccactggcagctctcccattccatccattacctgtctgtttcttctaatagattgtgaactcttatgaggacatgtattttaacatatttacctttggatttttagagcctagtatgagggtcttgcacatggtagacagtcaacaaatgttgaattaatgaatggagaaacattaaataaaaatggacatagatttctcatcacattcctcatgattgtagctattcctattccttcagattctgggcctttgttaaagcattctcatgcactgatatttgcatcttcccctataattgggaatagtgctactgtctacctactgaacactgttgaaaatttgaatgttcattttgcatgcttgaaataccagtggaaggccgggcgctgtggctcacgcctgtaatcccgtcactttgggaggccgaggtgggcggatcacgaggtcaggagatagagaccatcctggctaacatggtgaaaccccgtctctactaaacaaaaatacaaaaaattagctgggcatggtggcaggtgcctgtagtcccagctactcgggaggctgaggcaggagaatggcatgaacccgggaggcggagcttgcagtgagccgagatcgcgccactgcattccagcctgggcaacagaatgagactctgtcttaaaaaaaaaaaaaaagaaaagaaataccagtggaagggttctgcacaggaggatcatagtctatgattatacacacatcaaaaagctaatccaccctgaccaagtaggctttatccctgggatgcgaggttgctttaatatgctcaaatcaataaaaatgattcatcacataaacataactaaaaacaaaagccacatgatcatctcaatagatgcaaaaaaggctcttgataaaattcaacattctttcatattaaaatccctcaacaaactaggcattgaaggaacatacctcaaataacaagagcatctgtgacaaacccatagccaacaacatactgaacaggcaaaagctgaaagcattacccttaagaaccaagccaagacagggatgcccactttcaccactcctatttgacatactactggaagtcctagccaaagcagtcaggcaagagaaggaaataaaaggcatccaaataggaagagaggaagtcaaactatctctgtttgtagacaatatgattctatagtctctgcccaaaagctatagtctctgctcaaaagctatagtctctgcccaaaagctcctagatctgataaacaacttcagcaaagtttcaggacacaaaatcaatgtgcaaaaatcagtagcacttctgtacaccaacaacatccaagctgagaaccaaatcaagatctcagtcccattcacaatagacacacacacacacctccccaccccaggaatacaactaaccagggaggtggaagatctctacaatgagaattgtcaaacactgctgaaagaagtcagagacagcacaaacaaatggaaaagcattccatgctcattgacaggaaaaatcagtattgttaaaatgtccatatggcacaaagcaatttacagatttaatgctattcctgtcaaactaccaacctttttcacaaaattggggaaaaaaaatcctaaaaatcacatggaaccaaaaaagagcctgagtagccaaggcaatcctaagcaaaaagaactaagctgaaagcatcattacctgctttaaactatgtgacaggctgcagtatccaaaacagcatggtactggtacaaaaacagacacatagaccaacagaacagaatagagaacccagaaataaagctacacacctacaaccaactgatctttggcaaagttgacaaaaacaagcaaaggggagatgattcctatataatatatggcactggaggaactagctatccgtatgcagaagattgaaactcgaccccttcctttcaccgtatacgaaaatcaaatcaagatggattaaagacttaagtgtaaaacctgaaccctagaagaaaacctaggaaataccattctgggcataggccctggcaaagacttcatgacagagatgtcgaaagcaattgcaacaaaaacaaacattgacaaatgggacctaattaaactaaagagcttctgcatagcaaaagacagtatcgacagaataaacagacatgggagaaaatatttgcaaactatgcatgcaacaaaggtctaatatccagaatctataaggaatttaatcaaattaacaggcaaaaaacaactctattaggaagtgggtaaaggacatgaacagacacttctcaaaagaacacaaacccatgaccaacaagcatatgaaaaaatgctcaacatcactaatcattagagaaatgaaaatcaaaactacaagagataccacctcacagccatcagaatgcttattattaaaaagtcaaaaaataacaaatgctgatgagactgtggagaaaaaggaacacttatacacagttggtgggaatgtaaattagtccagccattgtcaaaagcagtttggtgattactcaaataacttctaacagaactaccattcaacccatcaatctcattatcgggtatattcccaaaggaatataaatagttccaccataaagacacatgaacttgtatgtttgtcacagaactattgagaataacaaagatgtgtaatcaacctatatgtccattgacagtagacaggaaaaagaaaatattgtatctataccccatgaaatactacacagccaaaaaaaaaaaaaaaaaaaaaaagaacaagatcatgtcttttgctgcgacatggatggagctagaggccattatcctaagtgaactaatgcaggaacagaaaaccaagtactgcatattcttacttatacttgggagctaaacatagaccatataggaacacaaagagaagaacaatagacagtggggcctacgtgagggtgaaggtaagtgggagagtgaggattgaaaaactacctatcaggtgctatgctcatcacctgggtgatgaaatcatctgtacaccaaacccccaagacatgcaatttacctatgtaacaaacctgcacatgtaccccggaactgaaaagtatgaaaaasaaaaagtctatggctatatagactatggtaactagggtcaattaagtaatatttgyactatactagtagcaaaactttcgagagagagaaggtattggaaaactttgctactagtatagtgcaaatattattcatttgaccctagttaccatagtctacatagccattgactttttgttttttacaattttatgttcgggggtacatgtgcaggtttgttatgtaggtaaattgcatgtcttgggggtttggtgtacagattatttagaatcaacttattgtgaaatatttatgcatttgtgcaagctcattcatacagacttcttattttcaatcacaaaacaattggagaaagattaaactagaatatatctatactttagaatggaatagaaacatatgtctagacatggaaagatgtccaagacatgttgctaagtgaaaagagagtgatatgcaatatatatatgtgtatatatataataaaatatataatatataaagagagagagaaagaactggaaaatttatatatatataaagtatacatatatatgaaatatatgtgtgtattttttattgaagaggcgaggtttcactatgttgcccaggctggtctggaactcctgagctcaggcaatccacctgccttggcctcccaaagtactgggattacaggcgtgaacaactgcacttggccgattttccaatactaatattgatgactcctgtgtattttcttttaatatgtatgtacacaacatacatgaagtagttttacaaaaattgattactgctgaaatcttaagtggtattgtctaaagtttgattaagatgatatttttaaaatttctacttcaaataaaattatgcaaattttattattgctaccccacaaaggtttaggcagtaatcttaacggaaaaagcctgcagtctttgaaagttggtgtaatcgtattaggaattcttgtgagtaatggtaaggtaaatgggaaaagatttcccaatttcattcagttttcatttaaaaaatccatatgtggttttgttttcatgctaatttctgatagactgatctttatgaatccatctgtcttaatgattttaagttgtggaattgtcatgagggactgtttggtgcttcacatatacaataaacatttaatttaacgtctttgcacgggaaagtgtgtaaaacatttagcatctgctatgaatggttataccttgtaaattgtaaattcaatagatggtgttttcataaaaatttgcatgtgctaagtgaggcttcattttaatacacaatttatagttaaatcatctctgtgttagcagtaggcagataatgaaatgtagatggtggttcagcattgtttatttattgagggaagaagtagatgaataaggaatagatttgatgtgatgaaaataatgggattgctggtcctgaaattcaagcctggttatatattatttactgattaataaatctaacagatagcatgaatacacatattattaagtaaagattctctttaggatgaaggtcatgtaaagccagagatattttgaagactgtcttcccatgggactgggagttttatatactaattaaaactctgtaaatttcctcacagcactagcagtccagtatcaggttttctgagctgattttaattaaagttgattttaggctcaatttaacttcatttgaagctaaaatggtctgcagaaagtagcctttaaggtctgagggtagaaggagaattgtgaaagagtgtatgtgtatgtgtgcatgtggtatgtgtgtgtgtttatatacatatgatatattcaagaacactaaagcctgccaaaaatatcatatggcttttttgttactgtagtttgtttgagctctagccagaggaacttcagccaaccaaagtcagacccctgaatcaccagtgtgtatctctgcgaccatggacaactcatttcaagcctttgcatctttatgtgctcatctatactctgtttttaaataattgctcccatcaaaatatacacttcagaagtcataagggaaaaagattgcaaatttaatatgttgtaacttccagataatgtgtatatatatatataatctggaaattatatatatataatctgaaagtttatatatatatataaactttatataaagtatgatatgaaatcataccacagtacacgcacacattgtttggtactatgcagtgttcgaaaataattttcacttctctgatgcccttaactgttagcatcatcactgtaatgcaggcaaagataatttataatttctgttggttttaaaaatattattaaaagtttagtcccaaaaatgaaaataattcatacatttatagaataaaaagggaaagtccctctcacaggattatagaattaaaaattattaacacttttctgtatctctttccagatccctttttctgaacatttacacacatgcaccacacacacacactgccacattatataacgttacacacacacacacacacagacacacacacacatacgtagcatatcactgtcttttcacttggcaacatgtcttggacatctttataacatgtatatacactttatataaagtggtatatatataaagtttatatatataataaatttattagttggctaaatatttatatattaaaaataaatagtatataagttctcacaaatcaaactgaatataaacatgaacaaaggatatgcaaacacaattcatagaagaagaaatcagatggccaataaacatatgacatatgcttaagttaataaattatcaagaaaaagttaatatgagatacctttattcactctgaggattgataaaaaatctaaaaagattcctgttatccagtgttggtaatgctatggggtgtgctgggcactctgatatactattagaaaagtttgagggaccatgttttcatttaacaatttaaatataacactttgccagtcattggactttttagaatcaatgtattgtagtgaaatatttatacatttcttcagactcatgcatgtagagtttttattttcaatcacaacacaattggagaaagattaaactagaatatatctatactttagaatagaaacatatgtctagacatggaaagatgtccaagacatgttgctaagtgaaaagacagtgatatgctgtgtgtgcgtgtgtgtgtgtgtgtgtgtgtgtgtgtaacattatataatgtgtctgtgtgtgtgtgtggtgcatgtgtgtaaatgttcagaaaaagggatctggaaagatatacagaaaagtgttaataattgttaattctataatcctgtgagagggactttccctttttattctataaatgtatgaattattttcattttatgggactaaacttttaataatatttttaaaaccaacagaaattataaattatctttgcctgcattacagtgatgatgctaacagttaagggcatcagagaagtgaaaattattttcgaacactgcatagtacmaaacaatgtgtgtgcatactgtggatatgacatcatccttagtatttgtacttccatataatgtatattagatgtaactttggatgagtgtgagtaccctccacttaagcagttaatttatcttacattatctttatttatcagatctggtggctttgaataatgctaaatttcgcttctgatcatcccagagaatcaaaatgaaaaggttgccacatgtaggagttttcagtctgtttcattctctctctctttctctgtgactacaaartgtttccctattctgcttttttcttcatctcttttctcattgtctctamttctaaaaacggttttctataaatactggaagcgcattgtaatttgacttcccaatagcaatgataaactttgaaatgcttaatattgtttaaatcaagacaacaaatgaaaccctgtctggctatcagtcttgttacagtctctcacttaggtaaagactcaagaacttttgcccatctcacgtctgcttcatcaggttcccaacatcctgtgcaccgataatgctaatatgcccaccatcaccttccccgattcattactcgaaggaaccctgggaaatttttggctcaaaaacttcagaggtcctaggtctcattactactgtcttcttattgacatggagacctatttgtagtttgagaaatcaatttagtggtttgaaactggcattttaaacacaagattgaaagtatcagaatgtataatatgtagaaagagtaagagaagtatcatttcataaaactttartctctttctcgctcttcatacatacacacacaaaacacattcaaatctctctctctctctgaatgtacatacacacacacaaacacacaaaatgtaaaatgtatttctattatgggttgtggtaaaaaaattcaaatcttctattttttgaactgctttcacttaatgatagtagatattacttcacttaatgatagcaataccttcaacttgtattgatgcttgataaaatattttatgaaattcatcattgtacccactcttaatacattatcaaggaagttattcattacatcacttcatcatggagactgtaagagaaattcctgtatggtataaatataagaataactggacattgttttgttttgtctttgggatactgtgaaatattctcttaactaggtttacctcttttttttttcttttttttttttttggcggagtttcactcttgttgcccaggctggagtgcagtggtgcgatctcggctcaccgcaaactccgcctcccaggttaaagttattctcctgcctcagcctcccgagtacctgggattacaggcatgcgccaccatgcctggctaatttttgtatttttagtagaggcggggtttctccatgttggtcaggctggtctcgaacccctgaccacaagtgctctgcccacctcggcctcccaaagtgctgggattacaggcatgagccaccaggcccggccggtttacttctttatattgtaattaaatagactagaactaatgctgtgattcccccataagtgaataagggtttttgtatgcattttactttgtcttatttcagacatttttaatctctgttcttgtttcccttttctatttctgatattattttataaacctactcttgttttctatttcattacccttatcgattatattaactctttcttctaaaataaataacattttctgaagaaaaaagacatatacagatgctgatgattctaagatgccataatcactttgtttgccataataaacaaacacaacaagacatgtaaaactcaggaatttctctttcttagtgcagcctcatatatgtcttcaaaccttgatgatcttttatatttaaatactatcttttctgaaagctgcttgacttccagtctttcatattaatgttttgtaagccaagagttaatgatattaactgctttaattaagtgcattagggrcacgagatttggcttctagttccagatttatcactgtgtgctcttggagaatttggcaattcaatggacttctctggatcatgttccttcatctataaaatggatatgataatatcaaattctcrtaaaagctgaagggataccccagatactcaaagttctttcttaggtctaacatttgtatatcaaagaacatgtcattctgttcgtttgttaatagcaacttcataagctcttttatatccagtgctgtgtagacatctgaccttttttaaagaaaaaaaagtattccattgcttcacccacatcacatgtcagcttttattgtaatattttactggaacatttatctttctctttatttttggattaccttttatcttttttgaatttttagtatcttagcacttgcatgacaatgaaaaatgttaaatgtttaaataaatatatttagaagtattaggtgcatataaaatacacacatataagcacatttaaaatctccatatttttctatatagtggtacaacacttgcttggaaataacatgaagtgatttatctcagctcttattttcacacatgcataatatagattgcaaattgtgttacattctgaggacattcttcagtattcacttgtttggaggtgagactctcaggagacttatgttttagaaatataaaacaaaagaaagaaaattatttaagaatccctctcttcttccacctatcttccatccagaaagggacatatatatatacacacacacatatatgttttgttgttgttgttgttgttgttgagacggagtctcactctgtcgctcaggctggagtgcatggcgccatcacagctcactgcaagctccgcctcccgggttcacgccattctcctgcctcagcctcccgagtagctgggactacgggcgcccgctaccacgcccggctaacttttttttgtatttttagtagagacagggtttcactgtatttgccaggatggtctcgatctcctgacctcgtgatctgcccgcctcagcctcccaaagtgctaggattacagacgtgagcccctgtgcccggctgggacttacatatttagaagagatacagtgacatagaggggaaattagttttcacagattttcaattcccaatgcagggattcttcaaagtcagagcaacctacagatgatagatgactaccaatgacaatgttttgacatcatatttacaggatttctttccggtcaacattgagcattttctacccctatgtataagagtggttgggaagacttctaattttttttcctgtccattcatctctcttacaagatacattattttgttgtagccttaagattcatattaatgcttggaaataaatttgagacaatagaagtgaccaaatatttatttccccaccagttgccggactcacattccttcaaagctgagacttccactccatgctatcatggtacatctccctctccacctttccccaatctttgcttaatgtattcatatgctcattttatctccattagggaggcccaaaatcagtcggatatcttagcctgcattggatcctccattgtctgaaatactgtactacagttgtcctcagagttatctgaactgacctatgtctgtattaaattttatctttttgagtgaaaggagtttatactgtcttactactttacaatatctatttgtaattctttagactctagtgtcatggaaaagctgtattttttcttctctctgaggttttcagtggttggatagtcaagatagcgcctggttaattagcagctggtttgtctacctccccagaggaatattcagtcctagcccaaccacaaaagcacagcttcaaacagggaaggtgactttgttgtgagtctaataagatcacaaggggctatatttggggcttcaactacagtggatggcctaggcatccaggctgatagctgattgactcctaataatctgaattattctctcaaaacaacacaactcaatgggagctactgatttgctagggtatcataaacagaaagagaattaatagtagtctctgccctgatacaaatccacttccactgaattgaaacaaactcagtaatcataaactagccargaatggtgaagacctactttgacctaaattggcttattgacttgagtttttttttctgaagaaaatacctcttattgcttatgattataaatttccacagggattagataaattatattttatcattaattttgtgtacgtggcaacatgattggggaaaattatctagtgattaaatgtaactgtatttgctttgctagaaaattacaccaaagaagaccaatgggtaagtagtctcacctctcttgtaaataccagattggaaactgggtgtgttctaggaagaacacacatgcacctcataaaagtaaatagaattaaatcaacaagaagtaagcactaattataccatagggtgaatagtttttaaaaagtcttgtcttttcaattgttagttatggtccattctaaaaaacatgttatgctcttataacagtgaggagatcctcaggggatgaatattagtaaaccctcaagacatcttatatatgaatatttggtttaaaactaaatatttaactctttgtgttaaatagcagagtaccacccttcatttgtaaaatagaattcaagatcataaatatgtgttggatgacagtagaacccgttttaatttgtacacacacaaacattatgttctttctctccctctctgtgtgtgtgtgtatatatatacatatatatatacacatttgtataaacatttgtatatacatttgtataaacatatatacatttgtataacatttgtatatacatttgtataaacatacatttgtattatatatatgtatatatatgtatgtatgtatgtatatatgtatgtatgcatgtaagcatatatgtgtgtatgtatgtatctgtctatctgaaggagaaaagtttcatgctggccactactaacaaaggtgatttgcaactgggcatggtggctcatgcctgtgatcccagaactttgggtggccaaggtgggttgatcacctgcggtcaggagttcaagactagcctgacaaatatggtgaaaccccttctctactaaaaatacaaaaattagccaagcgtggtggcgtgtgtctgtagtcccagctacttgggagcctgagataggagaattgcttgaacctgggagaaggaggttgcagtaagccatgatcatgccaatgctgcactacagcctargtgacagagtgagaccctgtctgaaaaaaaaaaaaaaaaaaaaaaaaaagagtgatgtgctatcaacatcaataatgaastacatgtctcaatagacatctcagtttgtattttctacacactcagttacatatcttgtaaataaaaggggaaaggtagattagtattttttatcccccgaccactgtatatcccatactcatcttagtacttaaatggctatttccaaatacattcattwtcttaagcatatgggatgagttgatggtatcctagatacaaaggagtctcattattttattttgccagaacttttttcttccccrcaggtttatagtttcatagttctttatagtatgctacgcccaaaggaggcatgaataccgaaataaaaaagtgccaatgttaagatacatgttttgcaccagaatataaattttcgcattggttgactgataacactgttgtattgtcatttttctcaragtaaggtcttactaagcctgttcttgaccattaccatcaagtaccattaccatcaagctatttataatctttgtatttagtttctatgtactagcaatagaaaatattatctttctcatctctttcatttagtgactaaatttccctagaatatacaagtgatctaagacccagggctggaaatgggaggtacatgtgagtttctcaaattatgcaagagctttatcatactatggcctgaaaaattcctgcatagtggccattgtctgtcttatagaaaggcaggagtttgcattcaccaaataaacgaaacaagaattcacagctgcagaaaattgaattacacattttcttaagacaatagtcatatcatggcaacagattacctacttaatcaactgtaatcaacttttagtaattgtgaaggtaaagttagttctattagctcaactcaaaacttcctttaagtagtaaaataaatctaattacattgagttaacttttttgatgactatagttttctactataggctatttttcaatgagttgaataatttgcttatatatttatatttttttatgatagtgttaatcaacttgacatatcaagaggataataattttctgctcattaaataatatccctaactatattgtcaaagtactcaaaatttaatgctgaaatatgtaggggctgagcggcctctgtgattgtttcagattgcatcttccattgttgaaagaattacctgtgatatcaattaatgttcatagaattttcggagccaattttaatgaaaagttaaacccagtactgtttatcagtgccagtaattgctctcctgtatgttataaccaggcctatctattcccaaatgccccgaggcagagctgtttatagatagccatgaaaacaatgttttgaaacttcagcttgcctgaatcaaaaacctccttttatgcatggttagttaaatcagccaaaaagatagttgacagcaatatttgaaaatatcctgaaaatggtttgaccttttcattaggtgctagaaataaaagcagagaattaaaagaagacttctatttaaccttttgaacaaaaaccggtttacaagtcaaacatatcttaggattgtgcgtgagctgctgatgacatagacactcatttgctccttaaagaacaaaatttgagcacaaggaaagaaaacctttctctggaacaagtaagctctatttaaaaagtgtaggtctctatttaaagagagtagggctggcaaaggcctttgtcgtctggccagcaaagaggataatgtgcagagacatttaaattcagtgggacaaacactaccctttgttggctcccacactctcagacacacacacagaacttccactaaagtgagagaactgtatctaatttggaattcagaagatggccaaaaataaatagtttattgtcatattcagatattatattcatggttttctaggttggtgtgtatgacatcactgctttaaacccagccatgcatcagcattggtcactgttctttctcatgcctagtcggggggtgggtttaaaagaagaaagtgttgagcatagatttgacaggacttgaaaactgggaaaggtttagggatacacttttgagttgaatcttttcctttttgctaatgctgcttctcatataacgtatattcaaatatattaggttttttaattacaaaagtaatacttgcttattgttttcaaatatattatgggtaagctgttttttaaaaagtgaaactgtctttctgcctctatgtccacatcctcagcaaaagcactgttgatatagtttttttcaacctttttgctatgcatttacaaatatacacgttcttttgtgtgtgcgtagatgtagaacatatattccaagtgtcattgagaacaacatatattttcctgcaagakgcattttttgaaaaaaacttggaaatatcaagggctgccttctgtgttaaaagctataaatactttcaacagattatccacagttgtacattatccacaatgtaagtgtaacatgattaatttttttcctaaggttggatatttagtttctctaaaatttttcactactatgaaaaaaagattcaacgtatatctaagtatatgctaatcaataaatgcttgtgaccatgtgagctttacattaaaaacaaaaagttttgaatatttgggtaaatgttgaattcccatcttgatagattctttcaaccctaaaaataagataggattactgacgtctttaaaataatggaaatatttattggccctagtgtatctgtggtatcattgaccttttaaaaaatccaaatctagatatgagtcagtggtgtgaaaacaaaaaataacagagagtttaaaattatttatgatgaaatatactgacacctaaaataacccccatgtgaagaaatatttcacactttattttaatatattttttatattttacagaaacacttatatatcrcttaccacaattatggtcactaatattaacctttttcatttaccatttttttacttcagagataaaaataaaaccaataaagttatgctgcttataaaacagaagaccttgagatgtgtctagttttattatattgttgtggagccatttgtattgttagcccatgtagaggaaaaacagaaatgcagccacgtccataattccttttattcatgtgtaggttataatttgaaatacatcagattaatgatcttagtcatgcaaatttaatttataaagttgagattattttcaccaatacctaaaacatctgtattcagagtttttgttaactatgctttattatccaggctgaatattgtagcaagaactttatagttaactgtcatatacatctcagaagactggcatacattttgtgaaatctatgaatttgattgcttaaaaactcctttggctcctatagtgtatgtattcctattagaatatacaattgaaagaacacaactagagcgtatacaaaggggagtggttaaatcatagaggaccctgtcacccacgctgtagtggagtggcatgatctctgctcactgcagttctgcctcctgggttcaagcaattctcctgccttagcttccctaatagctgggattacagacgtgcaccacaatacctggctaatttttgtatttgtagtagagaggaggtttcaccaagtgggccaggctggtctccaactccaactccaactccaaatccaattccaggcctcaagtgatccacccacctcagcctcctaaagtgctgagattacgcgcgtgagccaccatgcctggcgatctggaggtattctcctgtgaaaaagagacaactgtgattgttataaattattccataaactcttatgtgggaaacacattaaatttattctgtatagctacatgaagccaactaagaccaaagagtagatgttgaaaggagagcaacgttcaattttagtttaatccttaagaatatgttctgcttatattaataacaataatgcatatttatcgtacaaaatgcaagaaagcattaaaagaaaaaatatcacctttgatcccataaccaagaaatggtttggtaccttttctttaaagattttatatatgtatggttgtattcaaattgagtattaattattagatttctaacagttattaaattgcatagggaagagaggktaacgtaactattttatggtaaattgaacatttgtaataatttttttatttaaatattccacttttgaaaatggacccattccatcagtttcctttttggtcaatttcctattcatttctgaaaacaatttggaagagactcctttcaaaaatatattgcaaaaatggtacaaattaatttgcaaagtcaaattgtgtttttttggaaaggattcaggattttattgctaaaagtgagttggaaaacaacttggactgcaaggctcctgaaattctggtagaatttgatgtgttgatagttcaagaagaccaaacctacaagatttgtggcatagtagatgcttaaaaatataataataaagtgacagaatcggggcagatagaataatttgcatgtcagaggaataagaaaagctcttgggccaattaataggccctagagtattttgtcaaaactgaagcctgtgatataaaatcttacctttttgtgctggcaaaattaagcccaaaacactttataataagtaagtctgaacgtatgtataccttaagaccctgcatacacctttagatacatatccaatagaaatgtttacactaaatgtgttttccaaaagtacatgcacaagaatgtttgtagcagccctatttatagtagccaaaaagtgagagcaatgtgcctcaaaattagagtggataaattatgaaacattcatgtaatggaacaccatacagcaatgaaaaagaatgagccattgttacatacaataatattggtttaccttacaaatataatactgaaagaaagtaaccaaacacaagagtgcctactatatgactcaatttttataaagttaaaaatatggtcaaaactaacatggggtgttaaaagtctggctagtagttactttgagggtattaatgagagagggcacaaggagtgctgttgtggtgttcaaatgttttctttcttgatctagctggtttattgggagtgtttacttatattaatacactaagatatacacctatggtttgcccgcttttcaggatgtatgtagcactggaataaaagtttacataaaataaaaaagtttccccaccatggctcttccacccttcacaaaaaatactttctccattaaagaaggagctcagagttataaatattactgaaaattttattaaagatacatttaaatatactttttaaatgttttgtttaattttgaggaaaggtcttcctcaagtttattataaaatttaagtttactaattatctgtttgcagtatctcagataatgaaaatctccaatttatacctctgctctatactcatgtcttttctatttaacaaaattagaatcagacttttaaaatatgtttcacctattattctgtttttgccatttttcatgacattaaatatttccaactgaaatacgttctaacaaaggtgttaacaaatgaaacaartatctcaaaagatcatgctacctctattaaatatttgagttgaggctgcatggccacttatgggagaagtaagtggactcagactaagatatcaatgcctggcaaatattgggctgttcaatgtgtctgtggaatgaattaatgtttttggaagtccttccaactctgattgcctagaataagcaaagtcagcaagattattgtgaaatgctcactcactgacactaaatggtacataacagtgcctggttctaattattacatcaacatctgtgattactgattcaaccctagctctttgatatttattcaccaactttgccattgttttaaagatagatgataagcaccatgaatactgatggaagcctttgcttttggcaaagggtagacaaggtgtctccaaaaaggctttatttcagcggcagaagaatttctaacagagcttgtaaacttatttttagtctccgcccctttcccagttctggttacagggcagacacttttagtaattttgcttgtctgataaatgattctatcattattgatattgttcttctcttagccacatgtgaacacatttgattgagactttaagaaataaattatttcctatttcaagagtgcttctcttttgttacagaactcagaggtctgacttggaattgtgctttcattgtttcttcatattcatactataactaatattgctaatgccaaactttttattctattttttaggaagaggtgaagcttcagagattatattgtgattggtcagcttcttaatcagaaggaaaggagtgtttgtttagatatctcatacatttactttttgactgctatgcaacaagacatagaaaatgagggtgaaagtgtcaaagggaaaagagtagtagatgtcaaatgtcatacgtgtttctacatggatatatgttcacatataggttatgtatacatatacataccgctgtggtctgaaagtttgtgcccctccaaaatttatgttggaacctagtcaccattgtggtggtattaagaggtaaggtctttggaaagtgattaggtcagaatggccttgccctcaagaatggattagtgcctttacgaaacaggcctgagggagcttgtgggcccctttgccctttcatcatgtgacggcacagagaaagcatcgtccatgaggaatgggccctcaccagacataaatatgctagcccctcgattctggacttcccagcccccagaactgtgagaagtaagtttctgttgtttataaattacccagtctaagatatttttgttatagcaggctgaatggaccaagacacatgtatatgtgcgtktgtgtgtgtgtgtgtgtgtgtgtgtgtgtgtgwatatatgtgtgtgtgtgtgtatatatatgtgtgtgtgtgtgtgtgtatatgtatatatatatgcatacatataggtgagtatattggattacattagatagatatgcataaataatggagaatctcgattggccaggagtagaaattatacagtacagatctgacatgtggatttcccagatataatgcatccactgatgcattgtatccactgatttatgtggatatagaggtatccactgatttatgtggatattatttgtatccactgatctatgtggatatagaggtgcttcggcgggggttgggtggggggaaacatttgctattcagccctatcggcatatttggtgaactgtgtgatgtgagatggcttggagaacaggcggcacattttaggaaggagtttgtggtccctaggaaaagcttcactcaaagaaaagagtctggctcagtgacctggaattaaagggcacctggacactaggggaattatggctttgggaacagcatggcaatgtcacctaaatctgccccagttcagccatcgttatggtagatccatatcccagatgttaaggactgtgtggaacctaaaacagatacttcactaaagtattaggtctcaagtaactttgctgtaggatccatctgaagtccggagtcagcatttgaacttcagttagcagccttgagatgctagccagggcagtttgagtggccattgggcagattatcaagatagaattccaaggtcaacagcaaagtgacctgaatcctaggctgaactgtggtagccacacactccctgagcctcatgtagtgatctttcaagaccaggaacaaccaaaatgagcactaagaatgtggcccaaggataacatagaagtggcagcaggaacattgtccaggatacgtcagtaagaacacatacgcgtatgacactctgaggaaacaagcagaaatatcagaagtgagccttggaagttgaggctcatgtcttccaattgagggtcacaacctggagtgtgggcttgatttgtcaaaggacctttgtgggaaactacaggtgggaagacctgccatttgcatagagaaagagaaagaacatgtgaacagtcttataagatgcagacttagatgcatcaatatataattgatatggtttggctgtgtcctcacccaaatcttacctataattgtagctcccataatccccatatgtcatgggatggactcagtgggaggtaattgaatcatggggacaggtttttcccatgctgttctcattatagtgaataagtcttacaagatctgatggttttatacagggcagttcccctgcacatgctctcttgcctgccgccatgtaagatgtgccttttctcttccttcacgtgtcactgtgattgtgaggcctccccatccatgtggaactgtgactcctttaaacctcctttcctttataaattacccagtttcgggtatatctttattagaaacattagaacagactaatacaataatataaacttggacacacataatataaactaggatgctctatcaaggaaacaataaaatgttacctttttttcccaatgtaagtttaccatgattttgcttttttcttattcctgtgatgctttttataaaataaattataaagtattcattgaatgaatttatatcttctaatcagaattttccttaggaacttctctaattgtgtagttagggtaaaaattgctttgtatatgcctgtggtttcaaaagactggaatgtgctrtttatctttttatttaytgaaggttttcacttacttcttatgtatttcttatactgtattaattctaaagtattaacctatttccaggtgtaatgatgataagtacacaaaggtcagcattgattaaaaaaagtggggggaaggaatttaattctggagctaaaatccatttagttaaacagatcaaggacatacattaataggctgctgcaagcacataatagcctaagacataaataggcaaatatttttttccttggatgttaaattcacagtattcacagtagctgcctagagtattatgttaagaaagaggctgaggtttgtcggaaaagaattagtagtgcttatctgggagtgcctaaactagtgcctgggaggttgtggtgacacaagtgccacatatttgctaatccttgtctaaagcttcccttaactatttagtttagctagttcattaatactatataatatcataacttattttgttttgtttttcataatttgtctacagagattacattattttccaaaatttttgtatagattattacaaataagtaaatgtcagatattttatgcaggtatctggaactaaattatcaatatttataaatatgatctaaatcaaacagtacacttgctaaagcaatctacagatgaaaaccagagtctcatttagaattgcccaaagacaaaagggaagggactcaggagccttgaataaatggggaaattgttccttttcaattcagttgcagaaatatttatttagcaagtaccaagatattctcggaattagattatgcactgagagcctcataatctaatgcgaaaacagacatattattccaaagtataattgcctaaattaataattatagaattgctaaaattttctgaagtgttaattatggaattactaaaagccagcttagatgtaacaaaaaagatctaggaattgtccgatacatttattaatcttatcaaaatactggagatttacaaaatcagagatttttttacttttgggctcaaaaaattgaagttcttcttggacagtgtaattaatcttataattttaggtaggtcactcgaattttgagattaaaactctagaatactttataatagcagtgttttatatttgaatagcactttaaaatttgcaaagtgttatgttttcagatactttacttggtaatataaataggtcaagtactgtctycacttcctatgtaaggctactgtggctcagaaaatttaaacaagttactctagtttacaaagccagtggagttggaagtcaaacccaagtacttgggtttctaattccaaatcctttctttatgttagagtaagctcaacataatatattcttgaaagcaacttagaaacatacatcattataaggtaaaataaaatttatttatttacttttcttattgctcaccatgtgaagaacctgtgaamagcaagaaactttctttaattccctaaagaaaattatcttataccttgttatgcacctgctattttcagcatttatcctaaaaaatgtggcattggataattaaccaattatatgaattttatttaactgttttgttgttctaattatggggttaaatataattatttttctatagctttgtaaaggaaaacatcataagttaattttcattgtgtatcttggctcttgctgaggaaaatattcaaaataaaagctttgtcttacctaaaaatggaggaggatggcgtcagaatttactgtcatcttaactgatttctaataaggtgtctctgaacatacaggtctcacataattcacagctgcctttggtcttgattttttctttcttttttctttttgaaaactgaatatttttttactttatttaaagcccaatatttggataataaaaaggagacagggacatagaaataagtgtagtaaaaaagccagatatcttcctgtttgctctaagaaacttaatattctgtagcttgtatatagtcatgtaaataaagataaaattagttctgttttttcagtttaagttcaagttgatatttgaaatagcttttaaaaaaaaagttaagtcaaacccaaagaatcctgtaaaccttttactggaaatatttatggctatgatatccttgtccctttttctcatttttttgtgtaattttagccaggacattgatttcattacacaattgaagaatcctgtataattacagcatttaaatgaaatggaaaaagaattttgttactggtatttatctttttttccaaactgagaaggaacaattcttacagtgagaatctgccagccaggtctcagtgttgattataatcgtattttaaaaacataaatgaacgatttttatttaatcattttccaaaggatggattgaagcacaaaatctgttgcacacccagaagacagtgcaagaatggactgggttggggatgtagccaaccatctaattacaccaatagattcacagcacagttgggtcacaaattatgtttctaaatttagaaggtgaatctccaccataaattattgaaaagcactctgtggtactcctctctccatttcccacaaattagattactgaaagctataaagcatctttagaatgtgttttccttgctgtttaaaaatgttcctttatcatcaattagtgccaaccttgacatcagctataaccagaaaacattgaaaccaaaggataaaataaagaagcaaggaaattatttctaaaagaaacagaagaagcttttttacttgctagggagayttaactccttaaaatatttgtgagtttccatctctaaaattttcttgggatagaaatgtaatgacatattacataaatagggtccccagcacattttatttccttgctgatcgtattaggtaaaataattacagctgagctagaacaaattttgataaaataatttcattctaccataaattaagtcatttgcattatttgtccaactttacttttgatttgatttgattggttggttggttgatttttttgagatagagtctttctctgttgcccaggctggagtgcagcagtgtgatctccactcactgcaaactccacctcccgggttcaagtgattctcttgcctcagcctcccaagttactgggacacaggcacatgccaccatgcctggctaatttttgtatttttagttgagatggggtttcaccatgctggccaggctgatctcgaactcttgacctcaggtatccacccacgtcggcctcccaaagtgctgggattacaggtggtagcaaccaagcccagcccacctttagtttttgagcttatatatactcaccactttcattcatatgatttatgaacctgaaaaacagttgatggaagatattagaaaataagattatgtataacattacactaaatttaaggtttggcctctctatttcagttatgattttctctacaccacctctcttcctgtgtctataaaatgggaataacaatccttactgtgtacttacttaaatgggatgattcgcaagttcctcgttcacaagagatttttcaaattgttttttattttctaaattgaatatgcagtgatgtgccatgcagaactctggttccaagttaaaaatgtccaattcaaatagctgcagggtatttattggctcacataaacgatggccctggaagtagaaccagctttatatatagctatactcgggagtcacacatagttttatccaccttcagttttgctacaaattgtgttgtcctcaaactcaggttttctggtatagaaagatggcagtggagctcaagtgcctaccttttctgagaccttagtctagtagatttccattcccaggattccttggagatacttgttgaatctcagagattttgattaactcagcatgtccatttcttaacccttgctaatgagaaagaagagaataaagcttttttcatttcatatcccagaaaatgtgcatgcagttctgctcccatttttcctacagtatttcaagtgaaccactcagtgacaatcccatcaacttatactgccttactcttttaatttaatatgaaatagaactgtcattaactgaaagggaaattgcttcagtgaatatatttgtgaagaaataaaatygcttcagtgaatatatttgtgaagaaataaaattcatgagatattataaatttgatttgccttcaaaattttaatttaacttttaaaattagttacaaaatatagttttaaaaataatctaattattcataaacttttaattgagagtttctttctgattagttgctgtctgcccctgtgcagctgacccattatatttacaaattggttgatctctgcatataggccataatagttttataaactgtaggttataaacgtctgctctaattaattttctttcatatcaactgaatttgatgttgttgaggcattagtgagttttttaaaaatagtttacatagagcttcattttgttgattagtcaaaagtattgttaaactggcttcatggtgtttgaaatcacctattttcaggtgataagactttctaaattgatttttccttgttcctggatgggtcttattctgccagatgggagttagatcacttccattgaaagagagtctgcatgtgttcccagaagcacacacgtgtatgcaaatgcacacactgacactacagagtctggttcgtgtgttctttctcactatctgaggttgtgtatggccatacacgcctcagatggggttggtttttataaaaaygttaaggctgaatcatatttgttgtattgtgacatttgctgccttgccatcaaagagtaggtgcctttgtgctgacaactctttggcattttgccccagggaagtgttgcattatcaaaagagacgctcaccctctcagtgccagggtgctggtaattaaatcgtggatggttgaccagaattcacaggtgaaaatgatgaaaagaatgtattgaaatgaaaacctgaactaggcagcattatatctaatgagcaagaggagagctcttttaggcttggtaacttagatgagcatatgtgaactatggctaatgcttctgatagaaaatggttactaggaaaccataaaaaaccctctaattatgtgacctccaagctataccaataaatatagaattcagatgagtttgtgctaaaaccagtagtaacccactaatattattaatactcttgtagtttgtttccaaaggaagtaagatttattgtccttttaagtactggataacaattcacaaagattgaatttatttaaaagttcatagccaatgctactgtgttttaactgatgaattttggtttccttttgcagtgttctgtatcatggcgaaaggtcacaaaataatatcttgctatcaaaacttttttttgtggcttaactaggcaaaacttcgattaataaatgataagctgtagacctctactcagagtagtaacaaagagagagctggaggtggtggctcttgcttgtcactccaactcccatggagggtccttccttcttcaacctgactttcttatccccacagacctcatgtggaaccttgtaccatgggtgctattctgtggctgctgtaggatcttcccaggtagaaccagaccttatcctttttctttggtttcttgggagtagagctgaacatgagtgggtgacttccttttccaggctattggtcaaagctgcggtcagcaacaacttggccaagatatgcttgacccagttttgccacgggctactgaccaagaggttgctgttcggagttggcatgagtcagagaagcaggttaccagcaggttaccagctgggcaaaactcagatcgattagacatatcttggggtctttttacccctctctactcgtgttataattttttatcttaggcccctgcattccttcctctccttagccacaactgcctgatatctgttacttcctactaagttttaacagataaaccagactgaggttaaaatgctaagaattaactcctcttcccagaaaagtgtaatagaaggatactatagtggagtgggaatttgataggaaagcataaaattatattaaactggtaagtgaaaaaattttctacaaaaatggtgagtaaataaatagcattttggtagtttacatgctcagatgctttatttttctagtttttttttaaagcatttgtcttctggggaagcaattttataacaggtaatgtaagcttcctttgactgactgtaattgactaatggcaaccacagaaaacagcccttagccttcaatttttgctcccttgccagtaaatcgtcctgcctggggtgatgatttaattttcatggtattcaaattacaaattaacatttgcaagtgtagatttgggggattatgctggagcctagtagagttctctaaggatagtgtgtccccttgggctacatcatataacttccttattaaagtgaaaggaaattcccttttggttttcttacagcttttcttcctgtcctcatatttaagaaaggcatccatctattccactttaaatatcaagcttttcttatatcaagtatttcagatagtcagtttgcatactgcttatggatgaagttaagggttttggaaatgttagcctacagatttgcttttttttttttttttcgagacagaggttctgctcatcacccatggctcactggagcctcaaattcctgggcacaggcaatcttcccacctcagcctcttgggtagccgggactacagacatgtactaccacgcaccactgatctttttgactttttgtagagacaggatgtcattgtgttgtccaggctcgtctccaactcctggcctcaagtgatcctcctgcttcagcctcccaaagttatgtttgcttctaataatcatagttgttcatgagtagaaggtataattccagcccatcaccatactgatgataatttatagcattatttgtacttgtgtttgtagtttaacctgtgtggaattatagagaggaaacaaatcttttgacaggggctaagcttggtttcagggcagaataaacaatatttttttcaattatataaaattttgtagaattatggtaaatagcaactgcatttgaggaccaaaattcaaaggtttctgtattttatggaattcgaattcattctattgtattaagagtagattatcctggggccaggtgcagtggttcacgcctgtaatcccagcactttcagaggctgaggcgggtggataacctgaggttgggagttggagaccagcctgaccaatatggagtaaccccatctctactaaaaatacaaaattagcgaggcgtggtggcacatgtctgtaatcaatcccagctactcgggaggmtgaggcaggagaatcccttgaacccaggaggtggaggttgcagtgagctgagatcgcgccattgcattccagcctggacaacaagagcaaaactctgtctcaaaaaaaaaaaaaaaaaaaaaaggagtggattatcctgaacccaaatagaaagtatttgaagggaaagactatgttttcctgtaaggtagattgagcagaaaaattattaaaacaacctaatgatctactgtgactaacattttgcaactcaacctatttaataggctctggaaaataagcaatgatttctagagaagagtaaaaaagccagaagaagaaaattaaataagcggcactctttctgtggggaagcctattaaccgtggaaaagaataacaaagttaggcaaaagaagcctacaacaaatcttgcgtatgtgtacgtgtgcatgcgtatacatacatacacacatatatttctctcagacatacgcagacttttcagtcagaaaaaaaaggctaaatgttggaaaccagtacttaattgatttttagaatgcaaacctaaccctttttgacatagattgatcctattacaaaattcataaaatttaaaaataaaaatctgttatgtaatgcttaagtagatattggtaatttgggattaagtttcagttaaaatggtaaagggagaattttagtggaagtgtttattgtaaaattgaatgatactaaaatattttgcttacaatttttttaaaagtccaaaatgcttaaaaagttttggtcatatccaatatttcctaaaatgtttataatattgtaacctggtagtgtgacatttgcccctcattttgttagcagctgtattatgctctctaataatacaatttcttttttattatgtaaatataacactgaaattagtactaggaaaagcaactgcgtgttaaaaaccatcatattttttactggcaaatttggactgaagttgtcactttgtcacttttgtcattgcctacctttatctccagggcagcatctgatcagagatctcccttaattattttaagatcactgtgttactgttagattttttaaataaacatttagatgaaatatttgattaaactgttacactaaaaatgtgtttaaactaatatgactttagtcagtttcctatgatgataatgtagcttacatgtaagggatgcatcttatgtaccagacattcagctagacagctgacatagattatctcatttcatcctcccaaatgtgaggatgagaaaacagaggcctggagaaactgagcagtgtggtcgtgatcactaaattagtaaatggttatgttttgactaagtatttcttgttatcrtgtaatactatctatctcctttaaatagttataaaactcagagtttacaacttctggtcttaacattaaaaaaaaatcatctggaaattatgactatcatataaaagtatgttttaaccttcaaataatgatgttataagcaattccatcttcacagtcacccgccagtatttgatctctgataaatgaattgtttgttgcacacagcctcttagcttctttcctttgtctaggcttctggttctcatccactcttcatagaactgttttataaaattactcagacactaggttcacattattactcgattatttttaagaatgctgttaaaagtcaggaacctttatttatttattttcttaattaaaaccctcatacagaaaatgctcaatgaacatattctagttcttaacccccagatgaagaaataaaataatgccagtgcattagaattatagcaagcaagcccccaaccccaaccccaatccaaccttcttccccaaaggtaatctctatcttgatttctatcagtgtttttgtttcattttgcctgtttttatgctgtataaaatatcatgatattgtatatattcttttgtgactggcctttttattcaaacttaagttggtgagattgattcacaatgtcgtttataactttagtttgttgatttttactgctgtataatatctactccatgactgtgaatatatatgacaatttacttaccactttactcttgatgggtgtttaggtgtgtccagttttgatcatgtttaatagtgtttttattattgctgtttttcctatgcatagggaaaactttatatgccattaatatgccataggataacatataaatatagtcaaatttaatactcaatattgaacagttttccagggtgattgtgccaatgtatagtcctactggtactgtatgagagtgctggtcactccaattccttgtccatacttggtgtccacagttttgtaattttagctatgccactgggtatatagtttcagttttaattaaaatttttcttgaagagtcctataactgaaataaattgaactcatccttaacttatttctggatttatttcttacatttgtttaggattttagtctctatgtttacgaatgagattagtttgtaattttcctatcttgaaattctcttattagagttggcrccaagatatacccacataatgagttattcagtattttctcttttctggaagaacgtggtgttatttcttccttaaagttttgcaacagtttactgataaaattgtctgtgcctgcaggtgtgtgtgtggggcaaggggaggttttaaattatgggttagatttgttaaaaattgttttatgactattcaaatactctatttacttatatgtcagttgtgtatgtttggctagtcccttgtatctaaattttccatttttatttttataatggagaatcctattatatttgaagtctcctttaatattcctgcattatttgtttgaatttactgaacctctttgttctgcatattttttctatttaaataatttctgcagttacctttttaaaaaatttccttcagtttaacttttatttctttttctaagttttgaagtggttggttgcttattgattttgttttcctttatatattgaaaactrtagtttttcctctcagcatattatgctttagtttttcccagttttattatcatccaaataaaataattttttgttttccatttgattccctttttgacttatgagtgtaatacttgtcaaacccacagatgttatctgtttattatttattatgaatttctggattaattccactgggggtataggacatactcagattttaatacttggaaatttgttgagactcctctggtcaattatcctcaaggatttgtatgtacttgaagtcatgtgattaagtttttgttgcttgtgtggcatttactgagggaaatatgttaaaatctcccagcatgtctgtttgtctatttgacttttattttaaacatatttcattttcctttgtatctaatagtacttttttatggtgctaatttaactacactggttttcttttggttagtgtttgcatagtatatctctcattcatttcaaactttctatatctttatatttaaaatttcttttaagcagcatgttttagtccagactgaaaatacttgtcttctaaaattgtggtattaattcacttccatttaatatgattacagctacatttggatttcaaactaccatcatattttttagttctgaatggtaggtagtggcttaaaaagttctcaaagtcatctttttcctacttgaatatgttaagtatgtttattttaatatctgcattggatagcacattatttgtattacctgtaggttcatctgtgtcatcttgatttttgtcagattgtcttgtctcttcacatgcctagtcattttttaattgcatgtcagatgttctatgttaaaattctcagaaacaatgtgaggcctagtatgttgtttgaaattaacaagtcatttttcaaatgacagggagcattgctatacagtattgctatactggatcaatttaatcaaaattctgggattgaaatgattcaagtgtggtcttttatgttatctaggaatattttatgcttccttttatttctgtgttataacaccttggagtctcaatcctacatrgagtgttttgatataaccccctctttggtgagttctggacttcaatttatgtcctctaagatttagtagattgtcaaacctttgtttagcctctcarctaccttttctgaaatcactaaactttccaagggtcaatgtgataccaaattttaggcttactcctctgaattccttcttatcctgtatcttatccctttaatactttcttgtatgtttgggatattttgggcacttaggatctttagcttgatgtctttcatcagttttagttgcctttaaaaatatttgtagagcttttttagttctttctacaagtgttgattctttttacctgatacgccattatatgaagtacaatttcctcttttaacaaactctaaaattttttttagtttcttgaagttctttgctttatgttggttaattttatattgcttctccttgtatagatgcaacatagtcttgtatatttctaaagattcccattatttttaaattgcttataggttcttttatttcttgaattatctgtatttcatctattattgatttccctcctgtttattttgatattgctttttatgttgcttactttccccacaaagtccttcactgtgatccttcattatatattcattattaagaaagaggaaatacattagagagtctgatttctgtggaggtggktggggtttgtgaattttgcagctttcatttataattttttaaagagcagaatgtaaacaatacaaatgcactctcttttttctgggctgctagtttctgctgagtgggaataggagcaggatctactcttttggaatcagaatctgaataactcttcatacattcagatctgagtattagccgttgccttttcattccttgattttttttgagactaaagtctgtattcttctgtctttatttctttcccaaagtacaataatttatagctgtgtctgatcttcttaatcagttactaagcttctacccctttccacttctatcttttgtaaatttgttaaaaatcccttatccagtgatggactctctttctttttctaatgtggagatatatctatttagatgttatattaattttctgttgctgccatcaggaactaacataaatttagcaggttaaaacaacacaatttattattttacagttttgtgatctggaaattcagtaaggatctcaccagactaaaatcaaagtattagtggggcacattggctatgttctttgctggaggctataagggagaaatcagcttgttgctcatgcaagttggtggcagcattcaattctttgtctaagaatgagctactgtgttcttaacgatgaccactcgcagcttcttgaggttactcaccttccttgtcccgtgacctctatttcttttatgtatttatttatttagagacagggtttcactctcttgcccaggctagagtgcagtggcgtgatttcagctcagtgcaacctctgcctcccaggctcaagccatcctcctgcctcagtctcccaagtagctgggattacaagcatgcaccaccacacctggctaatttttgtatttttaatggagatgagttttgctgtgttgcccaggctggtttcaaactccttaactcaagtgatctgtccacctgggcctcccaaagttctaggattacaggcatgagccactgtgcctggccacagccctttttctttatcttcaaagccagtaatattgggtagacgtcctctcgtacttcaaattgcttctgtctctttatcattgtacatctctgaccgactcctctgacttcctctcctacttttaaggacaatgtgattaccttgggctcacccaaataatccaggataatctcctattttaaatttagctaattaaagcattaattccatctgcaatcttaattcccttttgccatgtagtgtaacacattcaacgaagtaagactaggggggtgaaaatcatgtggtcaaaaattctgcctgccacaatctgtggtctgcccactgccatgcactgaatgctccttcttacctttctgaagatcgtctgtctgtttcagggaaaccttattcttctcaatctccttatttctaccatttataatttccctccctcttttataaaatatctattcattcttatgmttgactattttctctttctctaagcactcttattttttcaaagagcttcaattactgtctatacaccagtgactttcaaatctgttatctgcccacaagacccatctgtaaaactacctacttggcattcctgtttggatgtttcacagtcaaataaactttaataaggccaaaatatctcaccgtcttcttccctactcacacattccaaacttactgatctttcctctttgttctctgtcagttaatggactcacattcccagtcagttatacagaccagaaatgtggtaatcatgtttgatatttccctctccctcataccctacctctatcagtcattgacctattaatgcttcctatcaactatcctttgaatgtttccagtttatctcactatcatatatactggtctccatctcactccaggcctctgctgctttctctgcctgaaacaactcttgttgtttttcctgctttcttgcctaagttatacttatcttttagacctctgataaatgtcactttcttggaaaagctctccacaaatcccagggctgtcataaaattctatacttgccatttatattaccgtaactataaatgattgataaattatgtaacttcataaaataaacattttattgttgaaaattttagatttacagaaaagttgccaagatattacagtccccatatattactcattctttttgccttatgtgttgttaatatctcatatcactatattacgtttattacaaccagagaasccacgttggcacattactgttgcccaaactccacagtttatttggattttaatagttttccccttgtgtcctcttcctgttccggtattccatctggtatacaatattgcatttggccatcatatatatccttgccttcctctggtccatgccattttctcagactttgtttttgaggaccttgaaaatcttgagtagtactactcagatattttataaaattccatctgttgggttatatctgtttttttcttcatggttagacttaggttataggtgttcagagaaagatcatggaggtgaagtacctttccctcaaatgatgcagagggtacatatcaatatgacttatcgctggtgatgtgaactttgaccacttggctgaggtaatgtttgctagacttctttaaagttacttttttctccctttttatactccactctttagaagcaagtcactaagcacaactcataaacaagggggtgaaatttaaactcctccttgagaagagggtatctacataaatcatttagaattcttctgtatgggagatttatctcttctccatttatttatttaaccacttacttagatcagtgtggacacatggatatttattttattctttgtgttacaattcaatactactttattttgttgctcaaattgttatagctttaaccattggaaggtgtaattttttttttttaagagaggggtcctgctgtgttgcccaggctggaatgcagtggctattcattcacaagtgtgatcatagtgtaatacagccttgaactcctgggctcaagtgaatctccttcctcagtctccctagtggctagactacaggcacgtgtctcttggcccagcttaattttttaaatgtctcttttcctggatagaatgtaaactacatgagtatgggcttcaggtcttctaaaattttagtgagaagcctggcacctggtaaaaatcaatttgtattttgtgcaaaaataaattcatgaatgaatgggatctgtaaagatgagaaagtatcattgtgcttatttaatgttgaatgattcctgtgttgtcttccatttctaagtgccagatatttctttatattctctgagcctccagactgtggtataagtacaaaccaagagacacaaaaatcaatttaaaagataaatctctgtattgtcagccttgagtttagatggatgacatcattgttaccttggtcatctgtctcacttcagacttttattcatgcatcttactcatcctgccatttctctaagtcttataatcacctactctacattgattcagacccacatctaattgtggtggcctctgggttttcccacagatagccaccaggtttttatgatttctagttttactccattggccagtgtgactaaatcaaacctgtgggaaggagctaagatttttttattgtggacctatgtatgtgtatgtgattttttaaaacttttggctgtgtgctgaaagaagaattgtgttaacttatttttaatattctgctactttccctttgggaaagaaaagtacattttcatggtcaaatatgggaactttatattattattcaccatcaattatagatctcataaatcaaaaagcagtattaaatgtcatatttgtaaatgctatttctgggaaataccagatctagtgttattttgggaaactgtgggttgaccttgcaaaactcacattaacgagaaaaaaaagyacattttaaatggtgacacatctaacagggagcttaacagagcaagagaaagtgtgtaggtgttcagtagtaacaacctaatggtaccacattgtatttcatgaatgggagcaattcacaaagttcccacaaataggacctcatgcaagaacacaactgtatagtggttttctctatccttattctatcaacattttatgagtccctactaagtagcagggaggatcctagttattgtgaaaataaaaatgagtgagttacaattccttcctgcatgtagctcagcttagcaggggaactcagatcttataggtaaatcattcatattatatattatagaaacaacgaatcataggttagatcaaccaggagagtaaaatcatgtcacccagcttgacgcccagatgtgttttcttgcatttaataagccagtagcagagaggaatataaggagctatgtcagaaacttaatggaggtgatctctgtgcatagcttattaataacgattttccaaatgttccatagtttctaagacaagtatatatatttttttaatttaagaaacagggccaggcatggtggctctcacttgtaattccagtgctttgggtggccaaggtaggaggaccccttgaggccaggagttcgagaccctgtctttaccaaataaataaataagccaggtgtggtggtgcatgcctgtagttctagctactcaggaggctcaggcaggaggatcagttgagcccacaagtttgaggctgcagtgagctatggttgcaccactgtactccaacctgggtgacagagggagacccccaactcttaaaaaaaaaaagaagccaaaccaaaaagccagttgttttaagctactataatctctaatttgtaacgataatttcagtatttccttgtgtttatttccatacgcttagccacttgtggagttttctttttgatggtattaaaataaaattctttcttttaaatcattaaaatgcagaggtaaaagaatctttcactacagacattagacagcctatgtgagaatctcttaaggcaggagttggcaaacgttttctataaagagccagatagcagtaaatattttgggctttgcaggctatatggcctctgctacaaggatttctctgctttttagcaggaaaaaaaccatagataatatgtaaataaatgggcgtggccatattccagtaatacattatttagaagaataggcggaaggttgaatttgccatagtttgccccacccctgacttggaggattcattaaaaatgcaaagaccaagttcttacaccttcctgaattagatttcagagagataagcctttggaatctgtgtgcttaaccagttgcatatattattaatattattattattacttatactcaagtttgtgaactttcattttatttatatactaggatatctgagtcctgaatttgtctctacagtattgctaggggatttttcatttagcttgaatagttactttgaacttttttttttattttgaactatatttatggagtacacctttatcagatggaacctctgtttcaaataattgaccgagaaaatatgaagggtaagtttctgttgagttaaagttcaaaaatggaaatgctgaaagaacaaggacctttttcctcctctttattgctatatttctagcacttggaactataaccggcacagggcaggtgttttgagaaatatttgtgtaatgaatgaatacacatttgtattacttcactctcggcatacagtgatggcctgaatccaaatggctgcactgtccctgtatttgatatctgggtaatcaagtcctagccatagcctttctgcttttacacaataycttttagtttttatccaatattccacctgtttgcattaattttggggttatgaatgctgcccttaattgtgctgtttcaacattcatggttccaaagcaacatctataagtatgaatgattatattagctaaggatcttttgactataatcaatgaaaatccatatggtcaacttaaacaaaaaaggtatctattaggaaaatgggttaggtgaaagctcagtatcaggggcctgctgaacttctctctggaatgctacccaacataactcagctcctaaccttatcctaactccaggcctgtgcacatgctgttctgtgtgccagtttttaattctgagagattgggattggcccagctaagggcaagtgcctgttgtttggtttaatttcttggctggtgggtcagggggaccattatgtaaccatccttgtggagagaaaatcagagattactaccagaaggatgtgggagaagagatgagagatgctaggaagatgcaactagtttagatatgttgattttggtgcctttaagaaaaaaaaaactttgcaaataactatttgtgctctgatttgccaaagccctgttttaaattctgctattaatgcaaaccaggctgcagacctctgaggtccatgctgattcttctctccaggcctctggtctgctgtgaacagggctgttctctaattgttacagacttcctctaaacctgaagatttgatttggagccttgctttagctgcctttagctggaagatttgattttgagtcctgtttttgcttttagattatatttatttataatatctatccctctctacttccaagaaaagattgttaattccagatttaaaatcaaattccatgctaagaaatgacacagatcatcttcagactgctccctgtaatctactcatctctggttctgtccttgattagctgccacccaaacagagtggcccagcatggtcctaaatccaagccataggayaaggatcctagaaagagaatggagttctttcccaatttatgtccccatctcccacatgcgcaacccccggaagctcagtctttgttcctttattgcagtctgcaactactgacaggttctgactgctgtctactccaaaagcatcatgtatacttctccccactgctttttgtgatacagttccactggcctgctttctgttacagacacacagaagtctattccctctgcgtgaagcgggccttccttacgtatttacaagaccggctccttcatgtttttcagatctcaggtcaagtgtctccaacttagcaagagatgccttctcaaccaccctttctaaatacatagagcatgcctcctgagtcactctgtatccccttaccctgttttattttaatgttgcaatgatccctatgtagaatgtcacttctttgtatacttgtttatcgctttgttttcctgctagagtgtatgccccaggagggcagagatcttgtctctggtttatcccagttgtttagaacagcacctgatgtactgggtgttcacttgtaaaaatgaatgaattaaggccacttagcaatttctaaatcacctttgatatacaacaatccatatgcacagcaatccagatagactcacctgtctgggatatgtcaaagccacggagaagaaaactcagcaatcagcatttttcagactgtggggagctgagatcactggccttgctgaatctctggtcccagaaacaaatacagacagggatcgccagcattacttaacacccattcaaaaaaaggcattggggatttgcagcaacttttatacccatgttcttttgtcacccttctcagtatctgtatcagcatgtttgtagggttcagcagagaattttgtcaggttaggaagaagtaacatatggtagttgtgatgaaaccttagcaccaggcatgcctctaacattaactcagaggacttgttttcgattctttcttttatgaaacccagcctttctattttctgctaaatcaacagttcctatatacacatcagctttacaagtctctaggagacaatatttcttttccactaatatgtgtattcacagcccaggtgcacatgtgcatggatgcacagacaagggactgcattttaagaagttttggcagaagccaagccatagcataactcattaagacaacctatgacaatataagaagagattattttggaaattcttaaggtaaagataaaagacaaaacatacatcgagtggtctttagcaaccctgagttctttcctcagtagctcttcttggatagcacacttaagttttcatatcaaatagtaatacagctcacctctcactgactagagccttgttatgttttccgtaaagcttcatgctgatggatcaacctgttggtgaaatggtgttaaatggtcttaaaatagttcagaaatcaaacccttcaaatctttgggtaaagtctaagaggagcattatattagctgtacagtaaataatgctataaaaagactcttgtatgagttaatggtgttccacacacatcacttagggtgcaggaatgaaacaacttgttcttaacttgccaagcccttgtacttttcagcttcttatctatgttcttggaaatcatcaaagaagaaatggaggaaggggatagcatggtaacatttctctgaggaaggctatttctttccgtccaatgctgattgtgagccttggtaatctctctcaacttttctatgtgcatacatatatgcattttatggaagctaaattaaattacatttaaaaacaacaatgtggcaaaatgttaataatgggtgaatctatgtagagggtatatggagttcttagtactattcttgtacctatactgtaagtttttagttgtctagaaaaatgtttaacaaaatatcagcagcatccaaggtggtcacacttgtgcttttgcatgtcaggtatccatctatagctgcccctgtggcatgtgttttttcctgctcgactctagccacaataatcactagggtaggctgagctgaactgatgaaatcagatatccagggaaacaaagcaatcaaattttaatatatttctttatttgtacatattttattatctttgaactatagttttttcctttgggggagtaaggcaggtttattaccaaattttaagaagattttatgttctcagagcatttaaagcatgtttgaaatagataatgattattttatgtgtttatcttgagctgagattcatattctatggtttcagggtrttagtgaactacttcttaataaacacagcatcaaacctgaaagtcagagacacaaaaacagtgaaatttaaaaccgtctccatagcaagaatctggaaaatctagaggagaaaaagtgaatgaataaggtagtatggaaggaagaaagagaggagaggagaagggtggaaaggggaggggagcaaaaagcaagaaagaaaggaaagaaggaatggtcaaaaggaaagagaaatctataaagacaccttgtatggatgttgctgatgtcacttattgggaagcataaaatgtaattgaaagatagtcacagtaagtgttaatagaattttaaactaaagttcattataggctgtggatttaccctgtgggttttgtggcagctcaggcttcaagcaaggcctgctgtagtgtcatggtcaggaggaatcctttgcctaacagagctcggaaggatcttgtggtggtcagtgaccagaccttgatcttttcacccagggaatccactgccttagtaacaaatctctgcaaatgggacaagagccatggactcttctgacccctgatcccacacaaagtgccatgtcaccaaatattctgtttcttgaactagtagggaattgttctgtgtataaagtgattaagttaaattctttgagtcacatttttacagagatttaagagttaattttatagagggtgccaagcttcttagaagcaagaatatggataaatatttttggttaccatttcccctgtcccgggagatatcttgctatcattatcagaaattacttttattattgtagaaagaagttcattctgtagccccaaacaaggcaaaggtggcaattggacaataaatcagtactttgtcaacatggagatgcatttttttctaattttactaacactgtagccagtcactatgccgccccagcccatgcagctgcataattatacatcagatctccaaaatgaattagtttatttttaaaacagctaattgccttagtggagtcatgttttaccagaagcacaaaagggctttgttcactgcagggaaattttcttctggaatgactgtgttaggctctagcttctgtaaatgtcagtcataaacagcaaaatatcagcaaaatccactaaaatcactaataatccagaacatctcaatgcgacttcagcattatttgctctgcatgtagctctatgtgattttaagattaaaatggcatagttaggtatgttctgtggtacaaccatatgtgactttttatgtgtgctttctgtagcccagtttagatatgtctcttgaaacccaactatgtgtttataaggcagacctcttattgcatgtttggtctccattagggatgacaagccaatttttggaaatcaagactcctctctattatagtcttaaacttcaatttttacattttgtttttggatgctattatatttaaatagaaatagcaggtgtaatgtttatgctatgttactctgcagggatagtgggctcagaaaacactgattaaggataagttcccacagtgtggcatcaccttgacaaattcacatcagtaatgcccacaaagactagtagattcaatcctaatgacaaatgaatactcacaataaaaagtatttccccaagggacaatatcctcatgacttaatgaccaacaagttgtaagaaaccagattataattagatgtatcatggcagaatattgactcaaacccatacttattagttacatggtttgagtgtttaatagcatgaggctaagacggctgactagatctgcctctaggggacttaaatgtggcaggaccatcacagacagcctcagatgtgaccccaaacccaacatgacgtaagtttctggactttctctttaaactttaaggcctgaagcattagtatttcagacttcataatgtataagaaaaaagccaaatgattatcatacagttaattttaaaagtccaattaaatatcttatttcttcccttaatatttctccctagaaggcaataaacttatctgtatatctctgtttcaattttttcttcgttctctgtccacacaggtcccaaatagattttattattttgaacaactaagttctggctccagttttgtattcctacctagaaaagcaaagcctgcagttagctaaaccctttctattgtttgcaaagttctgctttttaagtttgccccctggaggtctcatgttccatgccaaataggttttcaaagtatttacctaataattcctargaaaacattctgctcctaagaaaaataatacttaccacttacaaatataggaattcacatgcctttggtactgaacaccctctcctcaaagtagactttaggtgggcattgacaatgttcaccttgacaatgttcacctttgtgctctgcattttctctgactccaaagctaacacataccccttctgatgaatccttcattaaacagattaaagtaattaattatattatagtcaactatgactaatctgcaatctactatatattttctaatttgagttagctcccccaaaacatgaatattaggacaataataatagcctttgagaccttacttggtccccactaagtcacagtttaatccagcgtgtcttaatttctaagcaaaggctgacaaacagggtgatcagttatgtgtgcgtgcgtgcgtgcatgcgtgtgtgtgtgtgtgaaacaaatacacacaggtgtatttatttcaggaaccaaaagactgcatttacaaaatatatttgagatggagatagttattaaattaaggccaaattgtttccatatggtgaaaatacttctttactagtaaaagatatttttataatttaagaggtttaagatggtttcaaaattcatttctcatcacatttccagcattcatgagcctttgaaacttaaagccagagaggagcttatcatttgacaaattacataagagttccagaatttaatgttatgtcgattcttaaaattggccattattcacaaattatatttatcacatgcgttcatgaaaatcaagagaactttagaataattatatatattcctttatctaatgttaacgactcacagcctgtaactaccatctgccctttctgccaatggtgtatttattaatatattttaataacaattctaatagttttcattttagcttaaaatgtgtttgcctaccacaactatacctgcatttttctatgcttgcttttcacactagaaaacaaagaccagtcaatactttaattgcccaagggttgtaaacagacatgaatgattccttaaagcaccaatcacctttaggaaaaaacaaacaaacaaaaaaaactttttttttttttgagatggagtcttgctctgtcgcccaggctggagtgcagtggcaggatctgggctcactgcaagctccgcctcccgggttcacgccgttttcctgcctcagcctcccgagtagctgggactacaggcgcccgccaccatgccccggtaatattttgtatttttagtagagatggggtttcaccgtgttagccaggatggtcttgatctcctgacctcgggatccgcctgcctcggcctcccaaagtgctgggattacaggcgtgagccgccacgccgggccaaaatactgtacttttaagtgcagtttatgcattttctaattctgtgctgcactctcaggatgatgggctgcgcattattagctcattccttttatgttatattacttagtttgaaaatcaacttttatttcagatgccatagtaatttctcactgttgataacagaattacaatgagaaaaccttgaaaagaatacatttagtttaaattaaatagaaaagaaaagaggaagataaatttagccaagattcaatttargattgtaccagaatatttagttcccttacaaaatacaaagtattgctacttcaaatgaaaatttcttgagaaactctagccctcattaaatgaaatgtttgtaacaaaataaactttcactatcaatgtatcagagtccttattactcagcattcttaccaatacttggtattgttagactcaatttttgtctgtctgctgggtttaaaatggtgtctcattttggcttaattttcaattttctgattactaatgtgctgtaacatatttcatatgtggattggacattagagtttcttttccatcacttgcctattttcttttgccaactttattattgggttgtcttttcttattttttaaccattattaatatatattctgaatactcatttttgattcattaaattcactgtaaacgttttctctcaatctgtcattaatacatttccctttttaaaagtgtctttgcacaaaattatattattatatcatgtttatcaatctttttctttatgatttgtgttcttttatgtctcatttaaatcaattctttacctgagaatttaaatgtattctttgacattttttcttgtaaaacttttcaagtttgctttttgtatatatgtttaatctacttggaattgattttctgagtgggagtgtacatgtatatgtgtatgtgtagtttgatacaaaaaataagagtttaacatagagtagcaattatcttagcaccagttattgaaaatcttcccttctctgtagtgctagtattgatatatgtaaagcttccacatatgtgggacaatattccacatatgtgggcctaattgtcgttggtctattctgttctcttacctagttgtctatatttgaaccaataatgtattctcttttgtatagcttaacaaataactcctgaaatctgataaggcacataccctcattttaagttccttcaaaattatgacttttcttggaattttgctatttcatgtaaatatagaagtagcttgtcaagttaagaataatattaacactaaatattgatttttttctatccatggacaaaatgtatctccctatttttttctttattgtcctttatctattacttcttcaattcaggacactttacttagtttaactatcgctcaagactattttattaacattattttaatattatgtaatatggtaatggtttattatattacataatattgaagtgtgagagtaggcctgtgtgtgccaacactcagttatcctagattgcaatgctaagagaggtctaaaatctgctaattttagcttttcttctttctcctttattttataaattccactctgtcttttttttttttttttttctggaagattgcctgtttctagcagaaccttttcctcctttctattttttyttccctagtctgctgccaacgaactttttaraatttttttctgagataaaagtaaatttattttgagtatgaggtttacaacatactaattaattagctactagttgttgattaaatactgtgcaccagtgtttgtattaracattctaggttttcccagcaacactactattagggatagatggtaatcaccagtacatagataaaaccgaggataacatgccccagattatgaaattagagtgctgtgtggtcaagattgagtccgaatctatgttttttctcctagcaccaccctgcctctaacacataacaatattttaacactgaagtgtaatcagagacaatgtgctgtacaattctaaaaccagacaacctgattctgaggcaggatgggcacccttccctaactttggggccatagagcaactgctgtgccagaaagtttgtagggagggagagtggttaggtaagtagaagagacagagatacctgggggatagagctgcaggaggctttcaaaggtggttgtagtgagctgaataaagcatttccagtaggtcagagctgcagattgaggaaaggaaatagagttttaagatatttagtctgttctgctgcaacacgtgtttctataacaaaaattaaatgtgattggtacataggtgataatgagtataaagtgatgttggttcttaagtgatttttttctagtcatggggaaccagaagagtagaaatacaataataacttttagtaataaatgggaaagaaaaagccatcaactgggctgctacattgccaacaggaatcatttggagtatgtttaagaaattaaaaactagtatctgcatccagtgagttgcttatctcagttcctcgtgcccaaacttgttatgctgtaggctcatggcaggggacatttcctccaagcccacctaggctgcagccctgcagcagagctccagttctcccagcagtgcctcagtccccatcaccccgcttcactgtcctctctattgttttgtgcatttgtccatccactgtggcggcttctggccaagctgagctgctggttttttggagagggcaatccaacttttatccccacttaacaactgtaaatatcagtaataataataatattatatgataatgatagtgatgatggacatggtggtataattaccaaataacataggctttgaacagtttgcttataatcccatcatctcataaacttgttatttagagtacatatttaacagaatatgaattttctctggaacgcaattattgtgttattgctgcatacgtgtactgttacaggtctaatgtttccttcgtggtgttcaaaaattacaaataatggaccttacttacttagatattacttttgggttactcaaatggatattaactacaacaccactataaactgctgaacactatgggttatggttataagggttatacttggttctgtttactttgagtaccagggtatttttgtcttcagtagtcagattgtgtcaccccagtatccattataatacctaggaaatttattttcattctaggctttgaaaagatgataaaatgatgtaatgtgagttaatcaactgcagaatggcttactttcctatatagttaaagcaaaattatacatgacaaatgatgagttgtgatatgaatcttcagttcacccctcactgtggatctagtgtatacctttagcatatggagctaagtccaggctagattacttgccttgtgtagtctgaatgcttgaggttcagttctggatgggccacagtattgcatgaagacttttgtctggttgttacttcctcatgtccagatccttgtaattatttgcagaaaaatcattattagctgtgtctgtaatggcctgtgggtgactttatgtgccaagtcttcactaccagcattttcaaagggcttggtttccttccaagccattcatcaattgcctatcgccacatcatatatgccttgaggcatgatcattcagtcaggagcctctgtaactctgagtgtgctctgcactttctctgcaaaattaaggtgatggaaaagatcatattctgcttgttctggcaagaagggaagaggtctgaactgaaaacaggggcccamccatggaccctcatgtgccctgtcacactgttaaagagtatccctggctgctgagcatagtggtgtgtacctgcaatttcagctgcttgagaggttgagacaggagaatcacttcagcctaggagtttgagcccagcctgggcaacatagtaagacctggactcmccaaaaaaaaaaaaaaaaaaaaaaaaaaaaaaaaaaaaattctccttggctgccacgtctcagggattttttttaaaaactattttccccttatgtggatattgtttgtatttttgtcttgatctcagttatcttccagcaataaatacttgagatgttattagagttatcaaatcttacaaatgattattacagaaggatagaaaattgtattgaaggattaaaacataaattaagaagaaaagtaactgagcaatgcccttatttattttttttcttagagaagcatcacacatttttaagacatttttttggaatcacagagcataacttttcttcctgggccatcgaatcaaagcattaccaagggagcattaacagctaggtgtgcctggctctacagctcatgggtgtcctgtccagtggcttgctgccctctctggtcatgcccactttgtgtgaacactgaaggcccttcttcccaggagccattggaagaactaacacttgtcaaagcaaatcatatttgttatctaaatatgaggaaacccttaaaaacagaacaaagtctaacgcattactctataagacagatttttttgaagtactgctctgaagtgtgactttttccactgctatattaagaattagcaaaagaaaaagatggtgaattatgcattatatagtatatgcattatatacagtaaattacgctttatatactacaaagaaagaagaragatgcagaaaataatatggaagctaatggataagaaatatgtgcttaagttggggcaagaaagtcaacttttgatttctgtgaaagaaaacaaaggcttcaatgagtattatgtaaatgggtgtctcaagaacaggtaatgattgctgaaatgagggagatatcatcttaagcaactagaaaggacatgtgcgaaagcattgatatacagacaggatacagtgattttgaagaacctaagtaaagatgagagcaaggttttcagaaaaagcagaataaaggaaaataaacccacagcagtgaattggaagaactttgaccagtaatctgtttgatagtggatgtgttttgaggattatttatgacctgtatcagtaggcattgttgttatgatcataggaaaatcctgggaaagagggtttttggaatgaagggtggccatgttgtctaatgtgtcttcttacccaggtcgccctatgttaagaagcttaattctagaaaattttaaattgcttctggatacacataagaacttctggcagaatttttctcatctggaaataaagtcatttaaaatttttacaaatcaagttctttctgttttttcatttatctcaaattttctaaaactgatgctacattggcaattctgttaaagttcaaaattaacaaattttattaccagaaaggcttatatcatgactgtctaaacattgtgttattggcacagattcaaaattcaaaattttgagtattattttaatctttctgttttctatcaactgatttgaatcacatacatttaaatgtctgaaggccaatatattctactatgtaatgatctacacagttttgagatgttacaataattcatgattcatttgaaagtgtaaaaaagggtactttagttttaccctaatggctaaatatttaaaatactgttatggggctgggcatggtggccactgtaagcccagcactttgggaggctgaggtgggaggattgcttgagccaaggagttcaagcctaggcaacaaagcaagaccttatctctcaaaaaaaaaaaaaaaaaaaaaattagccagtcatggtggtgtgtgcctgtagtcccagcgcttgaggggagaggatcccttgagcccaggaggttgagtttgcagtgagctatgattacactactgcactacacctgggtgacagagcaagatcctattaaaaaaaaaaaaagtaaatgtctataggtattgaaatacaaaggtagccccattatcatagaacttgataatcatgggttctcatttcttaacccccatattggtttaagtttttttgttcatgtaatgctataagcatgttttgagtgaagtgcatattttaaatgaaatcaaatgyctgaagtttttgaatattatgtctgctgagtgttttctccctagcttttgaaggggatagcattaacttatgtttgtggattccctgttaattagcccttagaaccatttagctcctagattttagtttcgtttaactaggcctcggtttttgaagtcaacacataattattcctaattgaaataatgaaaaagtattaaccaggcatggtgatgcatgcctatgtctcagctactctgaaatcacgtgagaagattgcttgagcctaggagtttgaggctttagtaaactatgattatgctattgcatggcagtctggatgacagagcaagaccccacctgtaaaaaaaaaaaaaaggaaaacgtaaaaaattttagttcatctagggttttgaatttaaaataactaaacttgggttccaaagggtcccttctgcttataagcaagtaccattgagaatttccttcagacatagccaaaataagacaacagtccctgcttcattacaaaaaacagattgttacagcttcaggtgaaataactaatgttagctgattgattcttaaatagactgtccctgccatctggagagaaaacattagttggggggaacacattgtttactgaagatattcctaggttcgaattaaatgacaaacacaggcgtaattcattgtacctaatgaaggctctgtatttcatgtgagtgttgttatcaagcttcgtttctcatattaaaatgtcagatttggctttataaaaagaatatagcaaatagcccagcatattccaccaccttcttgttcattatttccatatcttatttggcagttaggaatcattgaatcattgaatatgaatggtttgtttagcagcctacagagtgatattcatatgatgaaaatttccattctaacttttcatatttaatttatatatatttattatatatatttattttttctttaagaaacaaagcagactaatgatttttatgttctgttttatgatgtttatagctgatgttagttcggcaatacagaactcaattatcttagttcagaatacagaattctaagtagtccttcaatcatttagttctaatttatgtattaatattatattataatcataatgactactgtatattgagtgctattatgttatcataatgctaggaactttatatttactgtttctaaatattgaagctatactgaaaggcagatgttaatatccccatttataacatgagagaattgtgactcagaaaggctaagtaacgtatccaagttgtacagtcctgcataataagtggcagagacaaaattcatatcaaattctgtcttaatccaggcctcttatccatacaataagccacattatttgaaatgttattgtcttagtctgttttgtgttgctgtaatagaataccacagactgggcaatttataaagaaaagaaatttatttacagttctggaggctgggaaatccaagagcatggtaagggcatcttgtgtggccttcttatttcatcatcccgtggtggaaggcagaagggcaagagagcatgagaaagcaagagatggctagatttgcttttataacaaacccatttatgataatgacattaatccattcctgaaggacctaatcacctcctaaaggtctcacttctcaacactgttgcattgggaattaagtttccaacatatgaactttgatggcaaactataccagttatatagttctgtttcataaaaaagagatgccattattctcatgaatcaaatttaaattaatatctgaagccaaagtttccacattttccagaatatatctctctgatctagaaagtatatgatcataaggcccttccttcaaaaggcttagaccatgtaggatctctttaaagctgaaaagacagccttcaactcgatgacaatgtaaggtggaacttctttttattagagctttgatgttctcagagtgtctcatcaatgtgttctgtagaaaaactgtaatagaagccagtatggccgttagacagaaccagggagacccttaagagcatagaaacaattgttaaaattattttcagtaaacatagtttcagtatagaaatggaaatgttttaagtaaattctctggaatcttgaatatctaattcctgtgtttaattataggaaaataaagcataatataatttataatctccatgttttatattgataatatgaaacatgtttgggtataatttcgtccagaaaaaatattagatttgggaagggtggtaggtagaatggggaatgataatgcagaagatggtcaaaattgtgtgcctgacatttatttgtgaaaataagtatgaatggaagtgtttagttatcaaatgttttatctacatttctgtagattcatatgtatctattcaaccaacatgtggctttgccaaggagatcatctttggagagtgttttgggggatgaaaaggatttactgcttttagctccagagaatatggtgcaccagcaagggcttctatctcccttctgtgagctcaccaaatgcagagacttttatattggatataaggaaaaagatacagaagtaggctgcttataaaagagagtgatgcctaaaataaaggcattgaaaagttgaaaataaagggaaagaaaaatatctaccaggcaaatgtgaataaaaagaaagtctgttgtagtaatcttgaggcaaaagtcatcataagggacaaagaaggacattatatactggtaaaatgaaaaagaatttcccaaatgaaaaagagtgaatacaagaacatcatgttcagagacatggaaaaatgaaaaatttgggtaatatccaggaattgtgtctgttgcatgatgtttgcaaaagaaagttaggggttgaactcctaggtcaggtggttgtcaaaacttgaatggccttagagtgtgtttgcctctgttcttggcactgaaataagagaagtcctgaagtagagaagattccataaccataggatgtataatataaacttagtgatatggccagttgtaaatgtttgtatttagttatatgccattgctataaatacttttgatctgttgaaacataagtaaaatatgttttaggtacttgctatttcttaaattcaatagttcacacccaattagatcgaattatgaagtcagaattgaattgcaacattaaccaaaagttgttgctattttcagaggctagctttctagaatcctcttgatttaaattggttatagatcatggtgtggtatgccacgtatcaacttgacttttgtagcaagaaatgatgtaaaaagctctgggttgacttttggtatctgctacaattatgttagcaagtagtaacttagtcttgtcacagctctcaaatgtggtatatattcagatgctacacatgacagaatttttggtgttcagaatttccaagttgataaatattaaatgtgcagctacataagaagcagacttattttgtggaataaaataaacttttgattcataccaagtagtgaagatcagaatgctaatccttaactggacttctagaatttttttattttcatagtcctgtagctaaaaatagtcttttcttgaaacagagctttccattaagtttctgatcctgtgaacaccttgtatgtacatagcttagtcaacataggatgggttagtcagtgttaacttgcatttcaaagtagacactgttaaataaagaaaatagtgcttcattattcagcatgaaccattacgtgtcacttaaaggaaaagcaaggttttctagttgatatgtactgatacattcaggcatatgtagtacatatactaatgcaaaatgatgttaagttgcttagttatcttatatgaaacattagttttagggtcacagaaatgctgtttatacgaagtataaaaattgtgttataagtttctgtagtgacctttgaagggaggcaaagttgggtctgaagctgtaatatatttcttctagaattttgagcgcaaatggtgtattcagtgaaattcatgagttaaagatagagcatgaagacattagccaatgcagcttataaccagagttttctggaagctctgtcatgactacaaggttactagtagtacaaggttcattactgtaaagcagagttacaaacacatttttatattttcttagtgctgatatctgctataaatgcctcacaagaaagatattttaatactttgttcattcaaattgtactagataatgatggtcacattgagatcatttatgctacagtctgatgccaagtctttttcactggttggtctatgttgtgggacaagaacaaggcaaaggaaatgcaaaaagtgaaagtgcaattaaactgcacttgctttcaatgagattctttattcagttatatacttagcttttaattatggtttatttttgttattaaattaatattttaataagaaactatataaaatgaataacaatgaaatattagaggttgaatagtatgttagtgatttactcaagatcagtagtcacttaataggttcatctgaagaaggaatcatttattcattgcagaaatatttattgagtgacatactatgtgccagacattatgctaagctctggtaatacaggagaaagcaaaatgaactattttttcaagttgatgcatgaaactttttataactctgagtaaataattcaacatttaatcaattatataactttctttagaatttatacagtttcttagaaaaacaaatgagtaacagcttttcaacattttaataatcatgaattaaaggtccataggaggatatttttaataatcagttatagtaatattagctagtatttattgaatacctatttgccaggtattgtataattctctatcatccttataacaatcctgagaaatttattattttgaatccatgcttataaattaaaatttagggaagacttgaagaaaatttagttacagagtttcttatcaaactgtatagtaatcaccttgattgtattgcttctaaaactgaaaattccatgaaagtagggcctgtctcattcttgtatacatttatatcttcagggcttgcactgtggctgtgaaatagttgatattcaatatatgaaataactcactttcatagaaaaaataaacttcccttgattctatcaaaagactattaagttttccttatctctaattacaggactgcacagggccatattgatttctcctcctgtgctggctgccttgagtgctgcagagaggggctgatgtgcaactggaaaacactcagaaaaaaatagaacctggaacaaaatggctgagcagggaaaagctgtgcacacatgcccatcatcttaagagtacaatgctgctctcattcgcaagctagaggatccctttcttagcaatccaccttagtctttcatactccgaatattgatagccttgttcttacctagccttacctagtctaattattttcatttttaaaaattgttctctaaaaatgttggctaatttgaaatcacaccaaaagatactttattcttttatatttttgctgtgtaactcctgcttttgaaaggatgatctcatcttatggttctcaaactttattgtgcatcagaattacttggagggctgattaaaatacagattccttccagagattctgacttactcgttctggggtaggaaccaataaattgcacttctagcaagttcccaggtgattttgatcctctgtaatcctctaaaaatagaataaatcttggctcaacacatcccatttgaagggaagagttattttcaatcactgcaaggccaatgattctaaagtttttgttgtcgttgatttgttttgctttcaaatataacagtctccctgaaatttcaatgccaacgtgatttctcagaccctttacctgctgtaaaatcttgcgtcagatgaggaagattttctcagaagaccatttgttatctaattaggctttctaagtggggagaaatcacttgttaattgagtatcccttattcacatagaattgatgatgttcctctaagaaatagaaaattcagataaataaggtcttgagttggaacaaaaattagtacactgtactttcccctccatcctattccttggaggtctaagggaatcaagctcactgactgcaggcaaatgcatatagttttattgctttaacaatagtttgaggaatgtgaggttgggagaagaggtaacatcaadgagtgagtgagtgagtgagtgagtgagtgagtggaggagcagcagttattggtgagtaatttgcagcatactacaattgtagagcacaaattcggtatttgaggtaattaagttttaaatcttacttcatttacattccagaatcatagggtttgttaatacatgaaaagtctctgcttgattacagatgaactgatgatatatcattgtggtagaataaattgggttacattacctcctttgcttgtttccagttatcaactgagattgattttagaagaaagcctattataatccagaaaaatacaacttgaactccataatctcaagtgttgaaatcccaaaagatgaaaatataattctgaaagaaataataaaacattctttatatttatttacattttaaaagggggtttatttgagaaaaattaaaacaaaacaatacactgtacacgataaaataaataatggcacatatttttacaagcaaaaacactcaggtatactagcaacagtcacaccagtataacagttatgatgcagacaaaccgtatttataaagaaataggtcaaaaatggaaatgtataaatgcatatcactgtggttgataattgtgtgcacccagctttatataactgtagtcatcttaaatttccggatgaagaagctaagctttttggcaagatggatcaaaaaattcagtgggtcaacaacacgcatatagttacccaaagaaccgagatcctgataaattttctttcacaagcgcagatgtacaaaatctttctttcatttattgaagaaatttcgacatgtttgggttcagaagtactgcttatatgcaaagtcaacgttgtgataatgcagttctcgtggaatcaaatttctgatgtccaaggcattcgaagagaagcctgccctagttctcagacagaaaccagttcacctcctgtgtctgttctatatgggtccccggcagatcggatggtgcctgctaacattgaggggagatcttcttcacctaatccactcaaactcacactaatgtcatctggaagcaccctcacagacacacccaaaaaatgctttaataggtttctaagtatttaatccagtgacatctcaaattgaatccacaggtccaccccttgtcaacttggctcccgtaagtctctccttaaccatacttaatttccaagtaaagactgtaacagccgcctaacatgatgcaactaacatgatgcaataatcctgcatacgaccaaaaactaatcgcttcaccagaatgcagctttcaagatttcatatttgagattttaatatttcgagattgttattttcaggattgtagacgtgagagattttagacctaagggatttagaccttagggattttgtatcttttcagatttcaacattcaggattatggcatgtgggattgtgtctttcaggattgtgatctaaatccattttagaaaaggtcattgtgagctagaggtctgaggatatttctggaaatattttggtgccatacaggttttttaatactttttttttgcttatatgtctgcatagaaagaaattggattatggtaactttgaaataacattttacattaggatttaattcccactttcatttactattaaattgagaacctgagatttttttggcccttgttactttttttacctttttctttgacctatgtgtatataacatataatatttggattagtttgcaataaatgcttacttaattgaatttgaatttgttacattgaaactttttaaactacccatctacctagcctgacatttgtattagcttgttatagttcttgtaatagaacatatatctttttcccccacattagtaaactgtagttttataaataccccaaaagaaactgagtcacatttctttactaacattactgagatgatgtgggaagaattaactcaacattcttaataatggaaatatggtaatcaatatagttgatggttgttttgatgatacttatttttcttctgagaaacaagtggggttttttgtaagtatccaatgtcttttcactctaaaatattttttcattatcaagagttaaataaaagagaagatggctgatggaaaaacatactgcaagaatgcagggatgaaacgtaaataaacctcatgttaaataatggtcaaaatgaagaagacacattatttacagtattttatgtggaatgccctttcctggatcctttaagaactaggataattactaactcagtcttctggagttttattctattttttattttttattataaaagctgagagatctttttttatcaattgttgtttgaaggtgtaatttaaacttaaaaagacaaaagatgcataggcatattgtatcaatatggtgattttgttatctcttttgtatattcatcataaatttttktattctgttaaaaatcactctgaaacagacagtgggtccatttttcatcagtagatcatattaaattttatttggaatatctcagataatgatttgtatcattttggtaagggacaagatggtgagactggataatataaatgctagacctatatggttagttattaattacctgtatttccttaagctactgtctttaaagcctgactccaatagtgagtccttttgtaatcaagcctccttcgtttcctcatgagtgaatttcaatgattgtttttcttaatataagaagttcttgttctgatctcaccacaaaaaaaatggtaactagctgagatgatagatttgtagcttgattatggtaattatttcacaaggtataggtgtatcaaatcatcaaattgtacacctgaaatataaagaatcttgatttgtcaaatataccgcaatttaaaaaatgttctttacataaatgttttgtagaataawaaaaaaaaaagttcttcaaaagaaatctcaaatctccaaatggaaacaggtaaaagtggagctcccctggttccacggagaaccttttttgaggaaacttaggcaactcgcaggtaccttatgtcatgagacagagtttgaaaactacaattgactatctctaaatttcctcccaggtctaaaatgtgatgatagttactacttcagtacatcatccttaaggaaaattattaggtccacactgtttctatcctttgaattttacacataaattttgtaatcaaaagtttatttgtaatatcagatggaatcagataattgctttttgttttttccactgacaggaacataagattttgttgtgtagcttaagtcaaacgcagtttggaatatatattttttaaaaattgtaacttacatatccaaatacaatttttcaagaagtagagtattcagtagaaattaatctgtgaaagaagaggaattcagcagtggcctatttgatgaatgatttaacgtgcttatttcttccctttcatcaaaactctgtgtccccttgtttgccccctctgacttcatactctggagttgaccaagatccctcttccatcggattgttctgggaattttgaaataatctgctttttcctctctttcccctgttgcttctgatgccttagaattacattttcctcgctgatttagtttagaaaagagaaaagagcttccatgactagtagattatcacttttgggtttgctcttggaagtgacaagatgctaggatccctctttggaatgtaaaatttatctcttatatagaaaggatataaatgtagcaccagagactataaaactctgatactatctactgtactgtatagctgaacgccacaatgtgtctggtaatctattgactatcataaatgctatttctacagaaaagttaggaggtccatatttcgggcaaccaatgtatagctgaatgcagaacagtcatagttgggtactaaccatatatatgatttatccatcaacaggtgcatatgctcagaaattctgtatccataagaaatcagactactttcttttccttttgcaagtaaattgaatttagcctgagaggctgaggggaaattttcacatataagccacggttttgtgttttgtgttttgttttgtttatagatatagtactaactggatggatgcgataaaattcataggtggtactaagatacaataggatttgtgaaatggacaattgtcttgcataaatagcaagtaaaaaatcaagcctgtccttcataaaaattttattctggggtgtgcttgttttccaaaastacctctgctaaatctcctgttagtcctgaaactagaaggcagaaaagcttctagtgctacagccaactgcagtgtagcctgagaaacaggcaacaaaaatagaacaccaggattgctgtgcgtgggtgaggcagaaaccacattatgagcaaaagcttccagtattattttagaaccaatacagagctctgtacttctctcctctctcttccaaaaacacatactacaaaaataaaatgaaatgaaatgtatgtgcatttgccctcttagaattatgattcttaattttttttcttgccttcctttctttggaagcgaatcgccagtatggaaacacagtgtgtaaagcaagcttcgagagaggaaagagttaattggttttaaggccctgcgatagagaattatggttggaaagatagaggctggacagctgggtttgctggggtatttttaaatgcattaatgcaggctccaatcactcggccatgcttgacctatttttggctcaggccgaccattgttctatttctgtgcctgtgggccatgctgttgttgattcatatgcaaatggattatcactcgctttagccaacttgagctgagagagactgagaaagggggaagagaggcacagacacagataggagaagggcaccggctggagccacttgcaggacwgagggtttttgcaacaaaaccctascagcctgaagaactctaagccaggtttaattggtttctttttctcgtgggtagacttaataattttctacgtattctgacaaagaaataaccccgaagcacgttcctatttcccacctgcttgtagtttccgggataacctaaactccagagagctatagcatccactctgtcctttctgctttgcacacaggttggtaacatgggaaaagtgtccaggtctttttaaaagtggatgcccatttgagcagaaaggaaatcattgtcgaagttgatcctctgctgcttctcctcagggaggagggagaaccagcgagggtagctcctggggccggtgcactgagcagtgatgaatgtttcatgtagctgaagtaagagtgactggaatatgctgcagacaatttacgagagtgactcctgtttttcctcagatggggtggctggacgagagcagctcttggctcagcaaagaatgcacagtatgatcagctcaggtaagatcctctttcataactgagacgttttaggtttgaaagggggctggcttgggaaatgcagctaagaaaagcacctctcttaaggaaattgctgctttttcgtgttgatgttgctattttcttggtgcgtctgtagggtttaacttagatcccttccattactgtttctgtgcatattcagtctgcttagggacagcagcttctgaatgaaattgcaaactattgcttctgatgaaagatgagactgagataagtaaaatgtagttgggggtgttttgcctttactatgcaactagaaaaaggagctgtgtactgattgtaagcctattctaataggactttaaaaatcaggtaagttcatattggggcttcagtttaaactgcagccccgctagcctgacgattttatatttactctgtgcctacagaagcacatctatttatagacctaccttctaaaatgtgtttgccacagagttataaaggtagttttcttttttccattatgtggctttttctcatcagccccaaatgaaactgtttaggatgaaataaaattgttattagcagatgcttattttaattttcttcaaaaacatgtgggaagtctagcattgtcaggcagatgtgatggcataacacacatgtaaatgtgttaaaagcaggtgcagcgttttaaaggataataggaacagattctaatttctagtttctcaaggagatgagctggtgggagattgagcttgtcagccttgtcaatttatacttactaaatgaacatactctccaggcagtatcacttaacgtgtaattattgcctttcatatttatttcctatggctatttcctaaagctttgggaactctttgtttctgtcctcttctgaatgtttcaacctaaaattggcttaaagttctcacttagatcccacttcccatgtgggcttaatcgtaattatagatcaccgcctagatttccatgataagaatgccacataaagcagtgtttactttgtagagctaggtgtgaaagaaatattccacaggttggcatgatgtctgttttggtgttaatacaccttcccatatggggatctatgtttaaagctagttttctttaaaccttggttagttatgttaattttaagatccttctgttgacccaatcttttcatggaatcagaataaaatatcaattttgcataatttggtatttatacacttaagtgacaggaattatgttaatgaatagtgcctgcttaacaaaagcaaacctaccagaatttcagtacagtttattcttatagctgcaaagctgacaagggctccgggagggtttaacaggtatgtctctaatgggactggtcatttaacttagcattttattttttaaaatatggatgaaccctttgaaaataactattttagaaatcttttcagcactatgctttatccttttagtcctcacttctgtgttacaagtttgatattttttttcatatggtagaaacatacatgccttccaagtagcaagtgtctgctgaagctaaggctggctacaggtgtttgcaagctttgcttttttctccacatctttgataatcacatacagctttacacccatttcagtagagattgtcattttcctagcatttaatggtttgtgtacaaagcaacaagattttcagacagggaagtgcttcaggctgtccatgctttggccagttctacaagaagcaacatttaagcagcagctagctattaaatgaaaagtgatgtaggttaacatcaactcccaaaacctgtctggtataaatacataatcactaagttctatttatttttaaaatgtgaagcataaaaacaattacacccttcctgccatgccatatatttcatatatgttcttaaatttaattcacctagtctttattgtatacttcctgtgaggcactggctctcaaagttggactcaccagaagcactttacaaaatatgatacctagattccactcccagaatgcctggtttaattggtatggggaacagcctggggattgaggtttttaaaatctccccaccttaaccttcagcaaactgagattcactgctgtagggctagggaacagatggtgatgctggtgaaccactatcagtagggtttgtcctttgagctaactgctaaattaggggtatgtttgtcttaatttagctacaaatcttgttcagctcccttttggaccagtggtctggacgtgattcataggcttagaagcagagtctttggatttgaaagagagaaaggatgcctggcagcagtgcaaaggagtggagagagcactgttctaggagtcagacactctgtattctagcatgagctccactgctagccgattgtgtactgatttttttactcatcttcaaactgaagaataatgatgtcctcctgcttgcctcttagcattcttgtgaggttcagatgtatcaatatgtctttaaaacgtatactcactattagaattgttgtttttagtgaatgaacctaagatcttggttttcaatgccatgttctatcttgctgaacaagccacatgagttacattgtaggtcacatgggggaaatgattgtttgttttgataatcagtttgccttagttatcttataaatcaactatttattttgttaccttggtttgataagagttgagatctttcctatgcagactatcactataggtaagagtagggtgtgtatgtgtgtgtgtgtgtgtgtgttctctgaaatgtctcattatgtaataaaggcaaagaagttgcacagtatgtgattgaacagtgaaccccaatcgcagatttcatgagattatttttaaaacattggttatgttgtgtaatttctttagcaattgcattagagttcccatttgttgttctagttatattggatattatgcactaatattgatggtttttgtacagagctctttatatactattggaatacaagttttttttatggttgtatgtttttttgatattgactcggccaggctaaacatgtttggtagaaccaggttctataatattgtactaatatattttagtttaaagttctataatattaaatcttagaattcagtgtgagtgacacattttgtcaagtacatccctacttttgtggcttgtgtgggccagggtaagtgataactgtggcagaaagtgaagcatgtacaaatattgactcaggtcactctgcaggagctggcaggattaggggtgttctcccattgccaagcatgttgcttaacacgttgggcagcagagctgtccagacaatattggaacaattattatgaaggaatttcctagagtttgtacagaagtaatgtaagatatatttacaataaggaaagctcatattttggccatctattcttactttagggtataaaagaaaaacatttaaatcaaagtcctgaaattcttttatatatcttcacccttttttgaatccttttgttccttagtgtatggtgttgaggggaagggaacattttagattcagtagtcacgtcacttatgtctacttgaaaagcagaatctaattatgaaaatgtaagtctgtgaaatgttcctgtcatgtcaagaatcacttctggtattccccataattactgttttgccattctctaactcaggttatcttcacttgcaagtctgttatcaattgagatagatgataggtatcaatcagaaatataattataaatgggctcattgagaatggagacaagaatgagtatttcatatttctaaggatgacacaggaggcataattattgttatgtccgttaagtaagaaaatccaataaaaccccttggaagactgaaataaatccaaattctgaattcaaaaaatattctaaatgatgattttaattttggagatgagcaattttaaaatgtgcctcataatttctcactactgataaataatgaagtgagcccaaaatagcatgtcagccagcaaacataccttccatccctgtcacccaatatattcaacagtaactgagcaaagaaaatgatataacctaatgcaacatacctcagaggctaacagccaaggcaaaaatggatgcagaggttctttgatcataacagagagacctgtctcctgggctgtcttagaattttactggcaagttgaccagttcctgaggattctcactaagattcccaaatctgaagagaagaaaactgagtaggtatcctcaccattttgggttgttcttgttttctcttgtggctgagaaatagtagaaatgaaggcttcagagcagcgtactaaattgggagaaagatcgatccatagctctttggaatgacgtacctttcaccaactaaacttagagattctgccaagaagaaaaacatcaactcattgaacccatggaattagacgtcttagtattgcttcctacaaatagagcaccttacataaattttmtattaaaaaaagctgaaaggtgagatgataaacaagagaatgagatgagaaaggagatatagatctcaggaaatgaatcaagaatggaaaatcataatgattatagaaaaaaatattcattagaaatagaagaaaacagaataggcccaggtaaaaatctttacacataaagatgaaaggtttgaaaaaaatcagagtaaatgaaaaaggaaaacagttagacaaagtagaaattctcaaacatgaaagaggctgcttgacagtgaaagccacacagtgaagagatgaacttaaaacaaacaaaaaactaaattcagaagtagagaaaacattatcaaagtaacgagggaacactgaatgcatttaaacaactattggattgtgtttatagggcagaaaacagatattataaagtaggggaatgtaaaaatattaataaagctggccagtgtgaggtgttagagagaggtgagatggaaggatgtgagaaatgctaatatccttccctttctgagcagggacagactccctgctgcttaaaatagaaacacatacttaaaaaaaagattcaaagcactgatttttaaaaatagtttatttaaccttaaagaggtctttttggaaatagtatctcttacgttaaggaagtatttagtacatttatagttccttcaactgcagttttaaatctgcttaattcagttaagtttaaatttaaattcagttaagtttaatttcagtttttaaaaataaatataacatcagtgatatgttcttatttttataattttttaaatctatccatccatctcctgaagaattcatataaagataggaagaaataaggaaagatgctgtgctgtgtttggtgaagaggaggggctttttctttcagcatcatacctctttacagtgtatgattttttataataggcatgtattctatgagaagtgttcattacacacccccacacaaagctaccatgtcaaaatactaacagtgattaattgtaagtagtaggtatattagttaggttgttttctcctgcagataaaagaacactctagtcaaaatgacagacaagtaggacatttatcatgtgataaagtagttgggtggttaggcagcaccaggtagtcaaaaatggcagcagcattcaggtccttcatatagctccactctgctggtcttagccttggttggtgtgatcctaagattggatcctccaatggtcacaaactgacttgtagcagttccaagcattatgtatgtttatgcataacaaattgcagagacaaaggttggatcctccaatggtcacaagttgactcgtagcagtttcaagcatcatgttatttatgcacgacaaactccagagacaaagaggggaaactgctgtcttggcgtctcttttaaaggaaagaaatcttacccagacttctccagcagatcatcctttattctatattgactagaatagcatcacctgcctattctttcacttgtttttcagaggagtgggacccatgactgagctgggaaggcaggatacctaaacctgctcaagtttctattgggaagaaccaagaagcaggaggaatagatgttagctaggcactagcagtatttgctacaacgtggatattggtgataagaagtttcttctttgcaattttatttactttttagtttccacaaatataataaagtaaatggactatgtttataatttccctttcagttgaactatgggtgttgactttcttttcatgaagataatatatctgtttaaatactaatgtaagtattttttactagtattgaatataagttttttattaatattgaatagattgcctttcttagtactgtctattgttagaagaagccccctaataaagagactgaagtaattgtagaagaaactggatctctctaagctattaatcatgttttctgaaggaaggagagtcaacattgtggcctcatgccttacaagcatttattataaacgtgaatagagtattcctttaatgttggcttcgaggcacacaaaattttttttgagaaatataataatatatgaattgttttcaatatatgaaaggaggattatcttaaaaatactcagaatgtgttcgccagtaggttgtcacaagtattacattttaagaatcatgaacaatttttacaatatggaatgataagcactacattttaacattttttttctgaatttgaatgctttgaaaataatttaattgaaataaaagctcatgcaaatgactttagaaaagaagctttcaagaagaaattcaaaaatatgttggcctctgcctcaaatgagtgttggctgtgccatggtcccccctgtttttgaaaggaagctgaagtgagtggttagcttgggatatgtggtgtccttcctgttggcagttttccccttttcttttcccagtaagttggcaataaggaagcaaagaaagaggaaatgcctggtgttcctagttccattcttcttcaactaagttggttgcacaaaacaaatttaatttaaacaacatttttcacaatactaaacgacctacactttcaagtgttatcagagaacgttatgtttaggtttactctgagttgctatgattcatgaatataagaataaatacttcttgtgtttttataagaatatattttccattcattatcataatgttaacttttccatagtaaaataagtgatgggcttttcgtgtacagtgtttcttaaatacccattaattaaatccartgaaaaccacttttaaggaagaaagaaatttaccaaaccacagagtgtaactagtcatttgcttatgattaaactttttgcatgctgataaggttggaaatacccacgactttattttcctgcttctccttatggttcaccacttgtatcagaaacttttaaattcataatgtatgttcattattgacccagttgcagccatgtggatgttattttcaatttgcttgaggtacattttggtgaatgtctaaggcatgacattttcaaatgagaatgtcatgaagttgtttcaaaatttgaaacttgatattaaaaacaaaataaaccccccaaaatccagaaaacaaaaaataagtaaatttcactgagttttcattaaatgacatcatagcttgggagttcttgctttagtaaaaatgtgtttacccagaaggttttcagggaaccccatgtagggtgaataagaaaaagctcttgtgttaagcactgttttaactttattcttgatgatgcttttgaaatctcataatcaaaattcaagggtgtattttaagtacatgatttttacattaggaactatccattttaagttagaaagttatcaccacccgtttttgtttttttctgtcatactcctctctgatcttctagttgcttagttccaattttattttattttgttttgttctgttttttgagacaaagtctcactctgtcatccaggcaggagtgcagtggtatgatcttggctcactgcaacctccaccttctggttcaagtgattgtcctgcctcagcctcccaagtagctgggattacaggcatgtgccaccatgcctgactaatttttgtagttttagtagagatggggtttcgccrtattggccaggctggtctcgaactcctgacctcaagtgatctgcccgccttggcctcccaaactgctggrattataggcatgagccgctgcgcccagcctagttccaattttagaggtcagtgattgtaagcatatttttttcaaaaatttttatgtcattcttttattattgacacaatggctaatgtttcaaaagtttctctgtgtatcacttgatcatttaatcctcaccacagtttaataatgcagtagttgttgcagcaatattggtgttttacagttgaggaaatatattcagagagataagaaatttactgatggttactgtaggtaggaaatggcagggtcgtgtttaaatggcagggtcctgcccctttttctcaaaaaatatttagcataggataattctgcttggtactaaaaatgtggacacatttatatatgtataaacaaatacctagacagacttcttaatcctgggaggtttaaggcacaaataggcaagcatgttgaaagttttgctggaagatccttacttcatgttctcagtgctagataattaaattcgaggaagttagcactatccagggctgagaggagcttaaggaaaccaagcttctatgagcgtgctcttttccttggagcagatgctctggacagaagcagcattcctgatgcatttggcacctgtttgccagtgttcatgatacacagatcatgagggtaaagttagccccgcttcaaaatagcaaattattattaatgtattttggcaggagaaagtaattttttttgaaatgttagcattatggggttcatttattttgaccaaaaggtttgaattatactcaccttggcatttaccttgaaatgtaaggttaataaagcctatatcaccactcaaatcctaatttcaacttgcaatgtgaaattctctagccacaataaagatctagctaacataattcagtttctacttattttgaatatatatctgtccaatttgggtccagtttggacaatttaggtgaaaactggatggctgtgtttatatgtattatcatcatactacgttttactttatcttgagttaattttgctttattggatgaatgtcatatgttctgtaggtggcttaagcgtaaaattcacccattacctactaatccaattatgcaaaagcccactcttggctttccaacaggtaatttttatgatcttatttgctatgagaatcttgagccatcttcaggaatcaatacattgtaaaagcattattgattatcacgttaatgattgacataatttattgccttcctaggggaaagaagctttcagaagatcattaaatgcattaaaacctgcagatgtccacatgtctgtgcctctctttagcagcctgactcctttgggtcagttattcttagcctcggtatttctatcttatggcatcgcaggtctaagattagcttgttaggcgttatcatgccatatgagttacctcctaatataactctacactggaatgattatttatagaaagagcattctgtcatttttgggttatttctagtagtttaaataaagaagaataacattcaagtgaaaccacagattccttcctgctgccaaaatagcatgataactgtctgcttaaggggcaataatgttgtttaaatgtgtgcttagggtgattgcagaattctttttatctctgccaccttgagagaaaagggagagctctggtaatgatgtatcatgcttatggaaaggcaaagaggcggccttgatgctgtctcagagcacacaggactctggttgatgatgacaacaagagacacacagggtttatttttagaaacagacattgctaagctctccatttggtgttaatattgctcataaacagagcttcttggggctgttgacccttctcgtgaatatggcattacacacacatactgttttcttttttcactttgtaagaatgattctattattgaaagtgtatatatatctgtttctaaaaattaagaaatctaaattctattcaatttctcaattttttttttttaatcccatgaagcttgggtttaagaattggtttatgaaaaacaattgactattataagcacaataaatatacaggttaactataagtatgggaaaaaggcaagtatacatcatgaatgacttttaataataaataacaccaatgctcctagctttattaccacaatatataaaatatagccataaaagatactgtcattataatgcactattgtgagttactgatttaaatagatgagataaaattctcagcatatgagaaaagtaagtgtaagcctctgcttgctgtttgggtattactacctcttgatgttcccagcaagtctcatatacagtaaaatatgcagttttacatttgagaagtgttctctcaatttactttgtgtgcttaattcaaaccttagcaattgttactttgctctaaaattagaattgtgttttaatgttaaattcgcattttatattttactattaactcatttttcctaaatgataaaaatgttaaaatggatgttagtgcattttatgttaaacatttgccaaatgctatagaatggataacttatgcaggtcttccaaatattcattacatattattattattattattattattattattattattactatttgagacggagtctcactctgtcgcccaggctggagtgcagtggcgcgatctcggctcactgcaagctccacctcccgggttcacaccaatctcccacctcagcctcccgagtagctggaactacaggcgcccgccaccacgcccggctagtttttttttgtatttttagtagagacggggtttcaccatgttagacaggatggtctagatctcctgacctcgtgatccgcccgcctcggcctcccaaagtgctggaattacaggcgtgagccaccgcacccggctattattattattattttttgagatgaggttttgctcttgttgcccaggctagagtgcaatggcgccctcttgggtcattgtaacctccgcctcccgggttcaagctattctgcctcagcctcctgagtagctgggattacacgcatgtgccaccaagcctggctaaatttgtatttttagtaaagatggggtttcttcacattggtcaggctggtctcgatctctcgacctcaggtgatccgcctgccttggcctcccatgtttttaaaagataaatatgttttgtgttttgtttggttatctgctgaccattaggaatttccaaaatgaaagacaaaaataggaaacacacagtaattgaaatgtatcttaaaagaagtcaagatggaaataaattcagagagtggaaatggaagcaactgaaggaacaacataacatgttgcatcctgaccactcttttaatgagcgggtcgaagactttggaagatgaaattgtttgaagctttgggaactggggtgaaagagtcatttatcggttcattttttcacccaaaactgttttaagaaccaaccatatgacacagaagatacagctattaaacaaagcaaggagatacatggttggttgttcaatggaatgatggatggatagataaagctacttgagataggaattagtattaaggtgaaataagagaatggggtagaaagtgactgatagggcagtattaactagggtagctagggtagttaagtgaaggcttttgagtctgctaacctgtaaagggtatctttctaaaaaaagtagattttccttcaacgtttaatttggtctaagtcaagtagaacagaagcacagttaaaatagattaggaatggtctggatctatttcaatattgttacctctgctttgtggaaaggatggggaagcatttagcagtaggtaggtaagggaactggagaaaggctgttagctatgattttctctgtttttcatagagatcgtgaaccaagtgcctctctcttgtattcatattattaacttgaagtgaaggctcttttagaacttgttccctttccttgttcctaaggttcacccttgtccctcatctcacctgccctgtcaattgtgcttacatttcttacccaagcagtatgagtcattgctagtagttcagtgaagcaaacagtttctctttctcagaaacccaaaagaaggggagcagagtatcttcgccagctgaagttagaagtcttagaacattttctcataaacacaatattgcacactttttaaaggrgtatgaaatacagtattcatcacacaggcatttactgtgtacctacaacgtgccaggtatttaattcaggtagatcatgggtcaaatcacacctttgttaggcggctggagaatcataacttcccaagaaaatatttagcatacatagcatacacagtcgtcgttgggttagcaactggctagattcgtgacaygttgttacaaaaaaatagttgtataaggaagtatttcatgaaggtgacacatctattttttaaaaagggagaaacagctaagagctatttttcctcacacattatrctttgtgaatagggaacaatggtggatacacagagtaggttggacaaacatttttgagggactgacacattatctcacatgcttgatgcctcatggggttttccctcaacattccaattggtctaagtcaaagcacaattagaatagagcaggaagtgttctggagctattttaatctccacttaacttctgccttgtggaaggggtggggaagcctttatcaatgggtaggtgggagaaccaggggaagactgtcagctacgattttctctagcctcaagaagactgagaccgagccaaactcctggccaacgtgctttgtggattcacagtgtagctygagaaaaatggttagtggtgacttgttttttcccccgagtgattatctcattcaatcagtatttattgagtccttgaaagctgtattttttaaatgaggctgcttgtttatctgtttttgttgttgttgatttcttagtctaagarttaccaggtatttccttcttctgagataccttaatgctctattccaactggtcatcactggggaaaattctcttacaagcccaatgcaaatgttacctaatgtctgacaccatcactgatttcccctcacctctgtaatattaatacttccctaattacgtgtattttttttctctttctcccttctctctcgatcctcatagtccttttattactctctttagaacatttccactttctgtcttacactgtgactgtgtatgtgtgtcctcatccccccaattagttatattataagctccaagaggaaaaggatcatgttttacttctatttttattccctacagtacctagcatataattgatccctgagactatttttagataaatgaatgattaaagagtacagtgttattgcacaatgtgtttttatacatttggtatttttaaaaaatgatttcttcttttatgaagaaaattactcctcagtttctttgtagatttgaaaaatgtagacatttttgaggtgttagagctttttgcccccaaattaaaattattcattatagaatgtaagcaggaatgacctccaatgctttaacaatgtgtgtatgaccctttaaatgcttcagttattcttaacgaagggaatttgggaatattcttatttgatgtgatttttcaatgaataatgaatgccaatagaaatttcctgggatatgtgtctgcattcaaaatgtgaaatgtgaaatagctaatttaagactgcctgaatataaatgcatactttttttaatccaagagaagaataaatttagttgtgaaaatgattacaggtgtacttttatgttattcaaataacactttgcatttaatactatttttcccttctcctatgtttttatgtagagacaattttcttagataaggggcaaaaataggtggatttttctgttaataataatatcaattggaaataatttatccccacaattgctatctagctcatctacatttattctgacattatttaattagctatattatttgacaagggggcaaggaatgatgatttttgatgaacaatttaatcaaaatctcaatgccaagggtatcagtaatttgaaaaattatctaaagtaaaatgtcagaataaggagttaacatagtgagatattaaggaaatatagatggaatgggtgaatcaatctctatgtacaactcttctaagagaagaatgagaaaattatctttatgtgtatgtgggaaaggaatggtatagggaataagatataaatctttcagggtagtctttttgctctattttatccttaaaacagcataaattaggataagggcattaagacttagaaaattaattgagttcgttgataatagatgtgtgggctgagaaaggagttagataataaaaccgaattttacagcataggtgttgaacacagtgtagtatatcatggtgaacaaatgtatgccagtgtccttttagtgaatttgcaaaggctgccaattaggctttcttatcattgttcatttgtttgctaaaagatgaacataaaaatattagaaaaaaattatctgaataccagcttaacctaacttttatattgtaagaaggaaaacaaccctcaatcaactgatacccgtagtacccctagtctctcactatttattatcccagtaattaaatggacattcttccacatccttgatctggaaagatcaatatctttttctttttttactttttctttccagcacatagtttcaaatctgaatatagttataactctaacgttagaaacctctatctcagttcagtcttagatgactacaaaccaaactaaattgccaggtacagtggttcatgcctttaattccagcactttgggaggctgcggtgggaggattgcttgagccaggaagtcaaggcttcagtgagccgacatcactccattgcactccagcctgggcagcagagtgagactctgtctcaaataaataaataaacaaataaaagaaaagacaaatattaaattgtttagtggacacaggagacaacattgttctatttgattatctactgcccagtcagcttccttgggcactcaaccaacaggtaacagagattatctttatgcttcaccagtcatatatatgagacccactttyttcacacccctgccaatatattggatattgtcagactgtagatatttttgccaatcttaaagatgaaaatggtagagaattacttttttctgtgaatttttctgactactgttggattcgagtggttttcatatgctattagccatatgggttttcttttatggagagagaattccaggaatgcaagattggttaaaggaaaaaagtctatcagtgaatgttgccctgttaataatgaattaagcaaaaaaaaaaaaaaaaaaatcttctcattagatgtagaaaaacatgcaataaaattcagtatacttccagcatagaaactcttattaaamtaaaaaatagaagagggaagtaagtattrttgaccaaaacccattcaccctatctgaaactttatatttaatggtaaaattaaaatacattctctttaatgtcaggaattgtctttggatgtcctagtcaatatttcaagacatgagcattcaataagatgtattagaaattaaaaggaaaataaaataattgaaataataaagagttcacttatattgctcagtacaaggtcagtacaaaataaaacattgaaaggactgttttatataaaaaacaaccaaacacaaaatgtaatagtgctagcatttacatggcaaatgaaacttttatggaaaaattaataacattgttgaagggcatataagaaaacttgatcagatttgagcgatgctatgctcaggaataggaagactacatctttaaaaagttatttattcccaaattaatctacatatctctttgtttttaaaacagttttttaaaaaagatgcttgatgaatagtattaagtcagatacactaagtgatgtataacaagaagtaaatcttatttccacctcaactctactaaccattcgatttcccacctcatacatagtctgctgtaaatttcttctatacattatatgtgtattatatttcagcacaatgttgattaaaatcctgacaggatctatgaaggaacaaggcatactgattccagaaattcaaatatacgagtaagtgtgcacaaatggcagttttgtaaagcaacaaatggagagaagaagcctagatgtcaagtcatacaaagctgtattaataatgattatttggtttgggcagggacatgctcacatagatgacaaggaatagaatacaacgttatttttagtagctttgtgtatgacagagtttgcatcacaaatcaatggaaagaggacaaactgttaattaaatagtttgggaacaattaatatattcagtttttaaactcatagccaaatgattttgtactcaaatatctatgtttgcaatactgttgttatccagttatgcaggttacaatttaaatttctgcaaagcctatgtattgtatcatgcatgtaggatcttgcattgtatagagggaccggaaggaattttatgaagatagggcagggactttagtaaagtggttctaaactaggtgagagaagtacacaatgtttatctagctcaattctcaaaaaataacttgagaccaaataaaagattcagatctatgagtacgatagagtgaaatagagaggtgataatttagtcaaagaagaaaggtagataactgtatcctaaagcttcaccaagttagtcactgaatagtgccttaaaagaccaatggagaagtgacttttaagctgatgcctgagtgactagaagagcccagccatgcaaagatcaaaggacagcaattccaggcagggggaacagccaatgccaaggcccttgagaccattatgtatttggctgttctcagaataaaggccactgtggctacatcactttcaacacaatagagaggattttcaggaggtttagccaaatctgccactgtctgtgtggagataggtaatctagctgtcttctctggcatctgtaagctaggatgggttgcctagattaccgttaggtccctgccatccttaaaaatgttagggatttgactttttaattccctaaaccagatcatatcgcaagactatgtctttcttgaacctccaaaataattttgatttagtgggcaaataaccccagtaatttgtttgatactgctagtttataatcctacagattttaggtttagaaacccattcacttctagcttatttaaacgttattgcttattttgaagcttatgccatgtctgactttggcttagaatgtgttgccttttcacaaaagtgttgtggtctgttatagacctgtttacaaagaactatcactaattgttatgacttatctagcttagtttgatacctcaaaacaatctgagtcaatctttctttttctgtggtgtgtatatgcgttgtatgtgtatatgcatatacaatgtatgtattacaactgtaattgaactatttcatatttttctctgtagcaagttatgtcattcttctaatagaagtagaaagaaatagatggaaaatttgactatatgccaaatttcttatagcttagaactatttattaccatcttagtaatgaagattattatttgattgtttatcagaaatataaagttgtatcgttagtgttcatgtttttcttccaatctctttgcccagtgactacatttgaattttctaggtcaatttaaaattgtatttcacttttaaaaattcggacttattttgggctaaaatagaaatttcagttaagcacaataacagagatgattgtaaaaatgcagaaattccagttaaatattaacacttaatataattaattgctgcaggtcagctgcttaataagtaaataattgtttccagctatcttttttccccagtttattttaatcaaaataattttcttggctgtgtgctgtggcccwtgcctataaacctcaggatttggaaggctaaggtgggaggatagcttgaggccaggagtttgagactatccagggcaacatagtgagaccctgtctctacaaaaataaaaacgaaaaataattagctggctgttgtggtgtgtgcctgtagtcctagctactccggaggctgaggtgggagggttgcttgagtccaggaatttgagtttgaagtgagctatgatcatgccgctgcactctagcctggatgacacataagaccctgtctctaaagataataagaaaataataacaataaaaataattttcttcgttaaactagtattttgggataagtactacatagtccttaggaatttttattcataactttttctaaactccagtttatagtcatatggttaaaatttaaaaacagaaagagagattatattggttattggttctaaagtcatattttattgggttttacacctactatggtgatatttaaatgatgccaaagctacatgttgcaatcaagataacaagagtattttttccttcttcctcattccaatcttttgaaatgtaatgcatggaaatttttctttcatatgttaagtgtatctcattgctgaatatagtgtgcctcactgaagtattcacttcgttgccaaaaacacatcagtcattcacaaatattcagtattctgagaatgaaatttttttttagctacttgggtagttggtgaaagccagtttgcaaagatttctaactcctacagcgttagacatattatgtggaatccagggctaagcagcagctcccaaaacatgaggtagagttctagatacattggacccttcaggccacagtatcctggaccaagatttgtagccagttaacagaatggcagtaagcagtcttctattttgtcagtgagatcaaagagcattataattttggagaacaaagggggttccatccctgagcacattcattagcatttaaaggaaatagttataaaataaaaatacaatccctgagttaattaaaacatggagtttcaacataagcaaacctaaggcttagaagattggttgacatataataattgcttaatgaatattcatgggataagtgaatgaatgaatggattgaatatcatccatttacagcagctgatatttcaagtgcacatgtgcgtttgcactttaaatgttctaggctttttatcctgggttttctaggcataagatatataaagaatatattttaaaagccaatttttaattttaaaacttaaagggaagaagaacttcttttcattcttcatgatgcttttactaaggacacattattatttttatgaatattaactacgtcatacttcaaatatggaggttcttcagtcacacttaaaattttttgggttgttttcttcagacaaaaatggctttgcagctgtgattttatactcttcatcctgcctgcgggcctctttctagtagggccacattgtgtcatcctaatttattatgtgcagtatagttagagaataaaacctcagatggttgggcttattgcgttggtttctaaaatgaaatttaaaagacctttaagaaggatttcctctgggtaaatatattcagttatgctcatatccatagaaaatgtaatttggacaataaaaggccaaaatcacttgagtctttggtatgttctggatagctggtgtttttagagttgtgatttccaggaaggaggatgtcaccttaccgccctagtcaatatcctatttacttaagaacagaaacagggaaaggacaactcaaccttcctctcacctccttcacatgagaaccccagaggatgttctgatgtgtgtcaaattcacattctagatagtaatatattaggctgggtgcagtggttcacgcctgtaatcccagcactttgggaggccgaggtgggtggatcacctgaggtcaggagttttgagaacagcctggccaacatggccaaaccctgtctctactaaaagtacaaaacttagccaggcgtggtggtgtgtgcctgtagtcccagctacttgggaggctgaggcaggagaatcacttgaacccaggaggcagaggttgcagtaagccgagatcgtgccattgcactccagcctgggtgacagagtcagactccatttcagaaaaaaaaaaaaaaaaaaaaaaaagatagtaatacattgagcatctgatctgccttagctgaaaaatcaaacatctggcataatggtaaaaaattatatagaaagattacttaaaaagacatctgattttaggcttctttttctggcaacaacaacaaccaccaccatcaccccaattcagccagcattctctacatttctaatttatgtttaaataaatatgaatatttagtccaagataaattttttgatcaaaactgatgatctcacacattgacagatttactttctggtatttaaagacaaacatattcagaaaggttaagcagtgcagggcgtcatgtgcttacaggaattgatatcttttaagagtccgtcattgtgactgcctcatttcacggcttgccacctgactctgttyttacaaacgataaaagttcaaataatacattatgaaaatgcgttctgaggatgttttatttacttgctactttccacttgtagtttcatgtcaagtatggtcccttacacctggtaagaactgaataccatgtttgggaatgaacgaactaaaggatcagcttgtgtgatgcgagagctgcctgcattatttcctcccctccatttctcctcttttacagtctagagtctagtatggctgctctcatagttcttctatacattcattctaaagaattagctgtaatctattacacatcatataccaactttgttattctcttgtcagtcacatatcttttctcaacactgatttgaacatttgtccatctttcaraacacgatgttgcaggtagaagagtacaagttaagacaggatgccttaattaaagaagaggcctttactcctgttttcttccattctcacccctctgtttctgccagaattgtgacagcagggcagaaaatgggcttttcgtgcagagttgacaagatacagggtagtgaagacaagaatcttctttcacatgctaagaaactcctgactatacttctgaagtagtaattggaatgacagcttttctggctgaagtacaatttttttgttttaaaaatacaaatggtccctctcattttctattcccagttctttcactcacatgctcacacttacagttatacagtgttcacacatacatttttcattgttttctcatttgaaataaaatgttatgagaaattttcaccataagcaaataatcacttattttatttgttttaattgagcttttaaaaggacattatttattattatttcacacactcgtgcatttattgatttactctctcccacagtgattgatttaccggtatttatcttctccaactagactgacttctaatgactcatttatttgggaacttcttctatacgaatcaaaatcaagagtttgaagtaacccagaaagagacttggagagcccaagggatctgtgaatgagctttaggcagtttctgaatctaagaaaattgtctgcaaacaaatatatttgtgtacatatgcatttttggggagagactgtcaattccatgtcttaatactcaaagaagtttgtgtccctagcaaacgtaagtgatcaattttagaaagagtgataacaaatttgattatttgggtcttcagcccaagactaaaaggcatagattacaagcaggggagtttactagatttagactacctaaagacttacctagagccacagcacacaataaaaagcaaaaagaaaaccaacccatcttccaaatatagaaaaggtcgagaaattaatgcaaaagcttgtcccacctccattaaagccgactgctgtatttaactggccctgagggaaccacagtttcacaatgcagttacggaaaggccagtaatagccctggctggctcctccatgtcatagatatctttaaaatcagagatgtatctaacccattttggaaagcataccttaaaacattaaagtgtttttgatatttcaaggaaaaggcttccgacatgtgaaatgtttattttctagattctcttattccaaaatgaaatcaaacgtgtatgaagctgtgggatgtgtcgtttgccccttgaagctatagtgtggtagaaattgaatctttatgtccagaagcccagtgtctgtattattagttttgcaaacatctgtgggctctaagtgattgataaatactatgtatagaattaacctaaagtttagtttgaagaccctacttcatagatcaatatgaaaatgatgccagcaaaaaatatagtttagacattgtgccttggaaaaatatttctatttatattaatgagcttatgtgatgtcatcacaactcattctaggaaagatctaggtcagtgtaatcctatctagagaaagttaaaaaagaataattgttgacttggtattcttcgtagtcagaaacaaattaaatgacaaattatgacactattttttattacatgacagacaaataaaaagttaccatatattaaatgctcaagaggttaatatctataaagcagaaatataaactgtaaatcagtaagaaataccagtaactcagtggataaataatcaaaggctatgaataagacatttacaaaggaataaccaaaaataggcagtaagtatccgagaagatgatcaatctttgtcatgattaacacatcaatgaggtgccatttttgtcaacattatgggagtaaaaataaatgactagataatgcttagtgttgattgtggtttggaggaaaggggtgttgtcatgtattagtggaagagcacactgttcaaattttggagcagcataaattggcagtactataaaaattaaaaatctacacacccaacaatctagtaattccacttaattggtatacagaaatacttgcacaaattcacaataatttatgtaccaggatatttatcagcagttttatttataataatggaaaactgagggcaatctaactataagtcaatacataatccatactctgaaatacaagtcattaaagttattaagtaaygtctgaagatattaacatagaaggatgagctcaatatattaatgaatgcaaaaaaatgtagaatggtatacagtacatatagcatagtaagctcaactaatggattcatggtacttgtttccattattttattgttgtagtaggagcagaaaagtagtaaaagtattttaacccaaagaaaaaaaatgctagcatgaaaatcacagttcaataaagtgtttttatatcagtatgtttattaataattaaaagtattaataagtttacttcaggaataagattaatttacgtatctgtgagaaacttcgtgatatacatcaaaatattaaagtaatcatgctatatttttcttttcattctgaagaccacctcttgcaggtaactttttctattttattatactgtcctattctcctttctttacttagttatatatcacaactatagaagaaataggttacctgttacttgcagaaatgtcactcactattaatattactttgcaacacagaaaatttttctgaataattagaggcaactaagcaagcctaaatggagttggttaattaagttataaaattctaagggagtatgatgaaccatgtagacatatgagctttctgttctgcttttttatcaaatgtttctggcacctgggttttctcaactgcccttctgttgaatatgattttcgaattgatgtaatgaagagtggtgctctctggacaagtaagctgttcatttgtagaataataatatgtcaacacatattttccaaaataacagtcctactaccgtaaatgtcttggaaacagttacctgacacccagagagtaagtacaactagcctagagccttggtctgacaccaagcaagagggtttatgaaagaagatagcccagaaagctggagycctgctctgctgtgtcgacatgtctacagctcagaataaaattgagtttcctgctttagccatagctgggtcttaaaataacctgaagaaattatagttctgattacatagaaagtgaaggacttagaacattctcctaataaagccatgagaatgacacaaagcttagtcatcggcagtcctcctctaacaggcgttttagagagaaaaatagaggtttgaaattggataatttgatttgaaatcttgcctaattattttaagaatgcagaaaacctttcttttttggccaaaaaaataatgatctggaatccaattaggaaagaacaggcttttaaaatgtttgatatctccagtaatggagaaaaatcatgtctttaaaattacattctgctacaaacctcattcttggatgtcttgctttttgcattttgaatggacaaatttaatgtaatttccttttggaaacatggcattggaaaagttagatgagatgtttaattttatgttggatcctatctaccagggtacagatttttaagaagaaaaacacttcttgtttcgttttatttcccaagggagatatctcacttaaccagatgccttgcgatttgtcacaatatagatcatttacacagaatttgtgtccagtcgtccatctatttgatttgcacaccatgaataaaataagcaaaatggataaagcttctaatactcccaattaaaaaattgctatctattttttcaccattaatatgctatcccaaatggcatttatcaccatactgtctcaccatatttattcgtatgctgttgttttctcaagatacgttcaattcagattatgtttgacttgcagccatatcaataatatgactaataataaacaacagtctaggatttccagtttttagaaaaacgataataaatttgaagtgaacctatattcagatttacattttacttagtattgtttttaaaaaaacattcaattaatattctgaaatgattccatttatttttactacaaagttagctggacctttacagcattttagagttttacacgaggtttagatttgactaagccttagtacgatgtctggaaacaggaggttgaatgaacatttgttgaaaggaaaaatcagttattgaaatattgtgtcttctgttatcattcttgagaaatggtggtgagacaacttagtagaagtgactaacaactacatatatacagaagacaggatgtaagtctccaaggtaatcaagaccaacaggaggatgttagaccaaaattaacaccgcgagaaatgtgttatgcatatattacagcccacgtgtgaaaatctgttcatttatagagagattgcttctctgtgaatggctaagttggctccactaagtacaaaaaagcacttagggccattcagaactaacagccacacactctgaaagactaaaccaaaagatacctgattagtaagtgctctttagatgtggggatagacgttttaacaaagaaaggacagggatggagaggactaaagctccgtgctgggaaactcttaaggagccagggcctcccaacaatatgctaagagtgcacccctagctgtctggccacattttcatttcttgtctcaatcctgaggattaatcatgaattccagtccagtttctttccaagcatataactggacatgacagagtatcttagcttytacatcataaagctcaattgttaatactgaaaaaaaaaaagcagggtggtttttttaaaaaaaacaaaaaacaaaaaacaaaaaaaaaaacatctaatgagcaaacaaaccaaacatgcctctcttrtttcttgtcctgtctattttttatttaagcgctgtaggtgaggtaattgaaatggagcccatgatatgtcttaagaaggattaataacattcagtgaccattaagtgctatgaattttcaatgtataatgttttatttgtttctcccaggaatcctctttgtaggtggtaaaaatcatttaacaagtgaggaaactgagctcaaagaggctgaataactttaattaacaagcatttatggatgtccactgtatttaggccaaagtaaatgatgtagtgtcttgcttccaagagcacattgtctagagtggaggaaaaaggcaaagtaaacatgagagaataggtgctaaaactagactttgcaatattgagaaggcctgggaagcctttcaaaggaaataaatgaaggggagttcagtgtttttgaagatggttggaggacatgatctataatgttgccatggctggagatgacactgcaaaccaggcaggagacagatgattaaggacctttaattccatgcaaagctagtgactttgaacttctaaaggattttaagaagagctgcatgatcagaaatacttcttggaaaagtaactttagctgctgtataaaggatgggacactccttaaaatgggttgtgtaattatcacataacctctaactattaactagaagtgcccagcaaggaatagggagagaatagtaagagtgaactggaaggaccagaaagagataaattgggaattcatgcaagaggtaaagggacaaattcagagtctgagatttccacattcataactgggtagatgtgttgccattattcattcattaattattttttgagtgtctcttatgtgccagacattatcttcgtgccaaaatagatgacagagcaaaacaaccttatatatttgcccttgtggaatgtgaaatctacactgtttgcacatgtatatgtgtgtgtgtgttgggagactgataataaattataaatgtacataattatgtaattggttagaaatggtgctgttagatgaacaaaaggtagggcagagaaaggtggttcatgagttgggagagaaaggtgcaccatcacatagagtagttagagtaggtaatttttatgaaggtaagattttcagcaaaggattggagaaggattgttaaggtgaggaattacacaagagacagatgaggagatttaaatgtagaccccgccctcccccacctccccctccccgctccgccctgcttcccattgcttgtcttgctattcacctggactggcagaataagcgtggagcttggtaggtaacattgattgactatcacaaaatgaagtgtagagcaacactgagagtaggaaaaccttacactatgaaaacatagaggggaaagaagcacttcttcatctggctgggttagctattctcaggataggtactcaagtatggaaggtatatagagattgggccttggcatacattcatatctacacagatagcatctatttacctgtgtagtgaatgtgagcatgataattcatgtaattaactgccatatttcttgtagggactgaaagttaacaactttgtatattaatactctaagagaactctaactatagtctccaacaagaattgcagggattttaaactcataattactcctcagctgtaaatttcagatgtgggttattgctttttctcatttaggggagtgaaattgcttcagccatcgactttgtgatgaggcctgcagtcagctgtagttgagaggggtgctcactctctgctattattagtagtttgtccacgtaaagacaatcatacaacatgtacaaaagttggattcaggatagcaacatattatgttttgtggctgcaagatatttaaatctaacaccaatagcataacgtttaaaaacaaaaattttattgaaaataaagtttatgtttggggcaaaggaagattaagaggataggaatatatattttcccattcttaactctgtctctcttctagggattgagagatacagagagattgagagagtgaattggagtgagtggatatgagttatatagcactgcctaatggattattacctcccaaacccctgagttgaagagtagatggagagcctgtgtaaaagattttgggtagacgattttgaaataaaacttagtgacatacacacacacacacacacacacacacacacacacacacattacagataagtatatatatggaaaaatatgtatacrcaaggaaaatactgctgttctaaatgtagtataatgattttaatatactacccaagaaatcttatgagactttaaaatcattttaagatttaataatagtaatggatttaatttttttagtatgctattcattacaaactagaaaaatcctaataaatcagtctgaatcagtaaagcctcatagatttccatgcaataatgtgtttcctcagttgcttttacaggaaaataattactaattatttgataaatttaattttggagcaaatgtgttgacagctgaaaaaacatgtaatgacttggatagagaccagatataacactagaacaaataatattggcgacttaaaaaaatagtaactgatgaaaaaaatctaattgcgttaaatattttaaagtacctaaaaataccaaggattttgtatcttttgtccttttctacttgaaatttcttaatcattttggtgatcatacaagataaatctttaaaattactgtgtgagtattcttaaaataaatataattctttggttaaactatacttctctaaattacatgcagtcttaataaaataattcctatggatgttaatgttcattctaaacaattttgctcaatccatatttttgtaaactgcattgctttgctttttttaaaagctactgtttatatagtcctagttcccagtttttcatatatactgtattgtgtctttaaaattagaaatgctgctgaaacatagaatatattaatccttgatgaaatgggacctctctttgagtataggactgttgcctgtacaactaagtctagtctttcagaacagaataggatgctgtatatctgttccctggaacttagatcctttggccttggttctacctgactttgagaaattacaatccctagtttttgtacatgtttcacttactttctgcatacgatttctggcttacttgactcttaagttcttgctgccagtcttgcctctgcagcagtccacattctctcaccaccaaagacataatgtcttgtggcttccccacttttatctctttgcctgctactcaacatttgttctgcaccagatgaaagtcactgttttaggtactttttaggggtacataaataattatttccttcaagaagccagcaatctgcataggaaaggttcacaaagcaattttgaaataatttaataagtctgcataatggattatcacatgagctttgtaatttatactattttgttggaattgtatagcaatatttataagttgttactatttgagaattcttgtgtcttaaatcatcttcctattagactgatatacaagtctccccattgaccacccccaatgccaaaaagaagcatgctgtgaacactgcaaagtaaactattagaaattaatggtcactacctataaagatagcaaaatactaaaggggtggtattttatgagcaatggaaacttttgttgtagatatttcaactgacactgtgcctttattactactttatacctacatctgaagrtccagactctagtagttgtaatacaatagatgcaaacagtgggaacatctagttcttgtcaatgtgtcaccaaaacatattatcaaagctaatctcataagggtgtcagaggaaattaaagttgcctttgsstgcatgttataagaactgactgaaattttaaactacctcagtagctgactatatacagcagcaggaagccttcaattaactgcaccagttctatttgtagtacaaaggatctatggcttaggatagcctacataacttaaaaagaaaaaaactcaactagatcttaacagtatcctgaagtacagcctgagagaaaaggatagatagggtcagataggagcatggagcatagtaactaattcaaagacaagggggtcttaggttgagctttaaaaaatgttctgtctagtcaataagaaattcagagacaatgtctttgaaagaaaggtaagccagaatgaagagtagcagtctacattctagagattataacaataaaagtcagcaatattaaatgatttagtatagaaaaaggtgagcttttacaagaataatggatagaaaagagttcttgaggttattaagtagaaattcacatggatttaataatgaaagatcatttccacatgatcctcaggccctgtttcttggactgtaattaagaagaaaaatggaagaacactaagagaaaggactaggaagtggtagtggctctaatgttcttcttttaccttttgaaatgctacctgatactaatttttgagaaaaatttgttggagagtgaaacttgcatgtcttttggataattttatttaaaggtgaatgatctcaattttaccttctttgtttttcacagttgcctccctctccttttgctatatggactatatgtatctaagtaagttaatgttggaaaaaagtttaaacattgagaaaattactgagggtgtctgggtaatatctcagaattagatttgaaagtcactgaacgatatgttgtggctcaatgaggaagttgttagatttgtgataataccgaaaaaaatccctcttttggttttatctaaattagcattcacaatacaaaagtcattctaagaattataattaggagtctgacattttacacagaatttggtagttatttttggtaaataatttttacagargatgtttgatcaaattaaaatgtaaaaattttaaggatcaacctatgattttcttgtattaatatattcacgtgggatctaaatgctgaaaaattgtattattattttttctagtttcaaatctaccagaatgtttatctataacaacttctatacagaagttgtttaaagttcatggaaactatcttctgtaggagacagtttacagtttacagttctgtaaaatgaatcataaaatccagaattttgctccacttgtcccattactgatccataaaaactggatttaatttctactgtagttatttttaaaaaatacacatttggtaccttaagaatgaaataattataggtcgggcatggtggttcacttctgtaatcccagcaatttgggagggcgaggcagtaggatcacttgaactcaagttcaagtggagtttgagaccaggctgagcaataaagcaagactcagtctctacgaaaataaaaataaaaataaaagtaaaaaagtaagccaggtgtggtggcacatgggaagctgaggtgggaggattggggaggtcgagggtgcttctgtagaagttttccatgaagtatttttttttttttaaattaggtsgaattaatttgcttatttttcagaaaatagattttggagctggtaagaagaaatgagaaatactaatatagcatattagaacaaataacattttatataagtgaaaacagaaaaaaattaggtaaaatgatatatttataagcccagtgaaggaaatggaatgaattatcttctgggttttcagaccaaatggactgtcagatcctttagttaaaaatttgaaatatcacctttaaaattaaggtttagtcttctcttctttgccactttacttacttttcagggcattaaaaattacttagcaaactcataattatgtaccagaataattccctttaataggaattttattctaggaaatcatttctaaaagtgataaaattttaccaatttacaaatacttttgtactaacagtattaataacaatgaattttatagtagtgatagatacataaggagacaggaatcgatgagcatgggacttattatggaatatagttgaccatgtttcaacatatgaagtattattagaaagtgatacctctctacctccactcttctttctaactttaacaatttcctgcccagtctagggtgtgcatatttggaattatacctatttacaaaggaaccacataartaaaaaacatgagataaaatggctattttagccatcagagtttttctggggtatttgtattacatttctgttttcttgcttgatgtytttatccttctgtcatgtgaatctctttattcccaaacatttgtctgggtattaaaccttttttcttatatgactcaatgttaagagagcctcaaacagctaaacaaaataacaatgagtggaaaatttctgtagccaagaagaaaattaaaaataggagacagaaaataaccagagaagaaaaaaaaaatcttttgaaaaatggtcaaatgtcatccagataaccttccaaggaaagctgcctctcatctccttcccccttcttttccttcctcatcttcctaaggttgtcagttggcataggacataaaagtaaataaaaagatgggcataaaagcaaatcaaaagtggtaggaaagcagccaataaaaatggggaggtattgtcccagaataaggacagagattttactttagccaattccaagttaagttttcatccaacacttagtttggtatttacatgaatgcttgtatagatttccaaagtagatgccaaagtagattgaggaagttagtggattagtccctagggtttgtttgttaaaagaatttgagaagcttcccataataactttaacataacagaaaagaaaactgataattgtgtgtatttcgtgtatttatggttatatacattatgtagtttatttcatccatagacttgttttttctcaatcatttctttagttgttttagaattaagaaaatgcattcatacattgttgaggaaagagtcttgaactcattggattcaccaatgtttaaaatctttattgcaccartttttttaaatctttattggttttcattgatctgatgtggttcatgattttccatgacattcactcttttaaaatgaatcataaaatccagcattttgctctgcttgtcccattacttatccataaaaactagatttaatttctactgtaattatttttttaaaatacacatttagtgctttaagaatggaataattacaggtcgggcayggtggttcacttccgtaatcccagcaatttgggggggtgtggcaggaggatcacttgaacccaagttcaagtggagtttgagaccaggctgggcaacaaagcaagatccagtctctacgtaaatagaaataaaaataaaaaaaataagccaggcatggtggcacatgggaggctgaggtggaaggattggggaggttgaggctgtagtgaaccatgatcatgccactcctgttctgcctgggcaacagagtgagatcctgtcttaaaacaaaacaaaaaagaatggaacaattataaaataatgtatgttctatctgaaaacaatgtcgttaacactttatggaagctgtccccagagttgagggacacttgctgatgtgaagttagccaacacatgactgcttcagaatagaaacaatgttcaatggtgttgaacaaaaaaaaaatgcacccttgctaaagctacttctaatgctgtgtagctctaacaaatgatttatactggttttccatttaatgagctggcagggaggatttttagctactgcaaaatcttctagaaaaaaaagaaacttgttgagaagtctctgaaagggtgtgaagtttcttattttacattcattaactttttattttattcaaagttcagaaataggctattggtcatgcattgtgaactcaccatctggctccatccagcttcctgagggatttcccccagtgtcacagtcttctgatgtacttcatgtttgtaaaagttttgaatgcttaattatatatataaaatatatatttatatatgtatgtgtatatgtatatataaatacatatatgtaacacttataaaagtgtgagaatttaaatatagatacatagttaaaaaaatcaatcggtatataaaggcttacagtgaaaagaaattatcctctatttcacttcagcttcagcccgactcgtttcagtactccagccctgcctcccatattagccattttaacaattttttactcgtatgcttctagtgcaacctctctgtctttaaataatattcttgctttattcactttcagcattgtctattgacttaatgcatggtaataagaataactcaccaatttttctcttttctcccctgcttcaaactatacttactttattcttagttcattcatttattataataattattattaattagtgttcagaaacctcaggaagaataattctcttaactggtttctaagttgttgagatatgtgtggatctgaatgatttggaaagtaagtaagtggactagcaaactgtaagcatcatataaatatgctttattaaggaatgtggttacactcaaattactcttttacttaagaaaataagaatttaaaccacttgacataaactgcaggaaattgttgaatgatttatcttaatttaatttctttaaattctttcctgtgatgtgctaatatgtatgtaattaagaaccaaatgagaaatgtactcttgaaaaaaactttaagttttgaaaaccttataaaaatataaaaagtcatttttcccctatgattaaagaaaatcaagttartgcatgacctatatgttgctccttgacagtctttaatagacaaaatactggatttcctataaataagaaaatggaaaggaaaaaatcctctgttcctttcatacttttaccccctaactctttaactatacaatgtagttcggcctctaatgtgcttgtgtaagcaaaactcaatacccttaacctccgagaaccacacttctactgttggagttctattgaactccatttcaatgcaaacaagtaaaggaaatgtttaaaaagttgacgtgtgatgagaaatgaactcttttatgttttgtcaaaatttggtgcttctggaaaaaaattgtcaaatacattttttggtccaaagctttcattttatatttaaagaattaaaaggctgggcacagtggctcaagcctgtaatcccagcactttgggaggccgaggcaggtggattacctgaggtcaggagtttgagaccagactggccaacatggtgaaaccctgtctctactaaaaatacaaaatattatctgggcatggtggtgcacacctgtagtcccagctacttgggaggctgaggcaggagaattgcttgaacctgggaggtggaggttgcagtgagcccagatcacaccactgcagtccagcctgtgagacgccatctcagaacaacaacaacaacaaaaaaccaaaacaaacaaacaaaaaaccacaaagaattaaaatacttccatactaaggcatcacattttggccatccaggaacactgttgcctacagtaagattatgagctctcctagaggtatgattctaaagcaagattaatgcatttgattatttctggatacagggatgggaagagaagtggtctaattattcatttaaaatataccaattccaaaaattaatttgttctttcttgtttaattatatgattttcttagaacatcataaacttcttgtttatgcctcttctctctactctgaatattgactatcgtgagagctgttcaggcattaaacaccgatttgaattttgggttctctatgagtgaacaagtaaaattatcaaaacgttatatattgatcctataccgtttttgttttaaatcaaagtaagtcatgcatttagtttaaaaaggaaaaggtcttttaatgaaaatagcagttctctactctgcctctccccaatcctccttttcactccacagcagcaactaccttcaacagttctggctttcttctgtttttttttttaactttaatatttctaaataacatatccgtttagaaaattatttgtttatgcattttaagcactatgcattgttttctcagcctgtgagatgaggaggttcccctgtacccatatgtgttcacccacaggagtgtgcttgtgtgtgtgcacacacacaaatatgtacacttttcttctctactcttcccagtagttgaatcaaatcaatagtatttatatgactagtcaaatgtttactgctgaaccaagtcatgtattataaccatgtcaattttcaagttcaacttaggcttttttctgaagttcattgcaaaatcgtaccctctatttatctggttttgtatacttgcatgtttctaccatgtgcttaaaaataaatattttccacacctgcagcacttcaactctattttctccgggagtttccagccttctttctctattgggaactaattgctttaggctccccactcatccttggtctgttcctttgctgttcttttgcgtaatcctctctttcttggattcttgtagcttctttgtcggttttatttttgttttaattttcagaagaatattttacaatagcttatatttgttgaatttttacatacctgaaaatgtcatttttctatctttttcaatgatagatttgtatgactgggcatagaacccttgtggaaaattattgtgagttctagtcccaatttgactctctttcctttgcatttggcttccccaacacatttggaagctttttagaatcttctctttatctctgtggttctaaaattgtataacagtgtatcttaccttattcattttctcggttattctatggcctctttcaccttggaggcttatgttttcagtatttagatactcactcgaattattttcctttctttaatataacttcttctcctttgtgttctctactcttatttttctgcagttcttactagttcagtgttagaccttctgattagagtctaattgtattttctttcaggtagatttagttcactttgtcttcaagaacatttagtgacattttaatttaagttactgagtttttaatttcaaagagtttaaaatttttttttaagtttttcatcaaagtgcaccgttctttattttaatgtagtaggtaacttcctctattcgatagaggctattaattatagttaaccacattttaatttttctgcgtgcactttatactttttctctgctctcctcctttcatgtttgttttgatctctcctgcgtgttgggagccttcatatttaaaatgagcatttgatctttggaagctcatcatttgtgtggcaattgtagcatagaggggttctggtatagacggcatggacatttagcagccctttcagtgggtacatgtgtgtttgtgtgtatgtggttagaaagaatccttgcatgtgcaggcgtgatggctcacagctgtaatgctagcactttgggaggctgaggcaggagggctgtttgagaccagcctggacaacacggtgtgaccctgtttctacaaaacaacaacaacaacaaattagccaggcatggcagtgcmtgcctgtagttcctgctactttggaggctgaggcaggaggattacttgagccttagaggtcaaggctgaagtgagctatgattgtgccactgcacttcagcttgggtaacagaataagaccttgtctaaaaaaaaatttagagagagagagaaaaagagagaatccttgcgtactagtgtctgcatttctcaccttatgagtcgttaggtgtctcaaggaaagaattttcccagcttctacttgaaggcaacgtgcttgtttgccagagctggggaagtagatgggtgagtgtgctttgtggaactgcactcgatccaccactgtgcagctcttgtgtcccacgtttctgctagagctgtggcctcacctcagttttgtttgtccagggaataactctttattcttctagtgaaaagaagggtagtaaatacagagagtggcagggacttagagaggaggagaaatgtcttggctgtgagggtatgggcatggtgatttaaggatgctacaatcagaccttaaaccagtccctgcgcttttgaccttgcgcttgaccactcgtcttcctctgtgcctttctgcaagttctgaacctcttagggattctctggcatgaggctgcttgttgctcactcactgcagttacttcgggttgtgctttctcctttcagtggggctgttaatcactatccaactcactttccatcttcagcaattcactgaactctcctgctcattcttgtcatctcttccctcttctttttttgctgtaggtttatagcattttaattcttttactgtcattttatggcatttctgaagggagtagaaataaatgcatttggtcaatccatcatttttattcagaagtcatacaatttttaaatcacccccaaattgatataataaatattattgttgatgttcttattattatttataatatgaaatattttaagttcataatactggagccattctgagaaagttcctaaaatagactactgcggaassccattattgccatggacctgatatatttacatctataattttaatgaggatgtcataagattaaaatttgtgatggacatttgtgatctctctcaatgatgatctctattatatctacatacattcatttctttattaatagctcatccatgcagaactcaattatccaacaatctcattttattgataacaaatgctagaaaaagaaagtatcagaaatggctttgaaacaacgtttgcattgaatctacaaacatttttytggggatagcccataaaggcattaagcaaaaaaaaaaaaaaaaaaaaaaaaaaatttacttctatttcataaccaagtacaacagcttttgaaatttacatttcaaatacacagaacttagcaaacaaaacagaagaaaataagagggagcctgtgaacagacaaggaatgatcaatgaaactctacaataaagaggaagagaggggaaccagatggtagccaaagcaactcacattcctattaggagcttgtaggagaagctgtagatgccccactcaaacctcccagggctctgtcatttttatgttccccggcctggctcttgtctgcataaacctctctttgcctcagagctttcttttgtagttcaagcctacactgcaacccaggtgcatgacaggttaaaagtgccagagaattaatgccaccaggaagcagcctgcartgaatgactggcagaattgatgtgtaaatatcccagcttccttgccccttggttaagtctaaagtatgtgttgtgcactggtgaccagaggtccctggaaggatgaagctccagttgtcactgtggtaatctgcctgctttcttggctgccttcctttactgtctcatttctctactctactataagcatgatgttttcccgaatcagctcccacctaaaccacaaatttgaactaaaatttgtaacttaatttggaagagcccaaaataagaaagaactatttagatttggagaacaattacgtattcctcaacaggacattattatatgtacaaaaagtgaaatatttaattttcaggatgacccacattcagtgaggaaacattcagttacattcaatatattctatttaagaacataaggatcatgtatatgtttaagaagacttctacttaatctagctaatacattatggttccagtgtttgacctttacttatatggaaatttaaaccaccctgaatgattcatctgattaaaattctggatatataagagctcttgggttaaggaaaacacgtgtgaatgttaaggtactttaaggaaataggagattattaactaaattgtatacaacaaaaatcctccataagcctctgtaaattcaagagaatatactagggagggtattaaataagttagttatagttactactcttttggaagatagaatattctaaaatatttaaaaagttaacacatttatgaaataaatgcttgcataaaatactatgtgtatatctgtgtgtgctttctcccagcttcccctggaaattagtttactagaatatccttattgctaacacatttccacgttctcctgactctcttgggatcatctgaactatggggctaacttactctcactctactacaaaaatttaactaacaggaataatcgtaaagcaaacattttaagtgtatcctgaataaaaaattgtctccatgcttctccattctgctttctcatcttctaacaaaaactaccagaagagactaaggactaaattttgggacaggtgaaggagagagttgaatctctctgccaggagaatggaagaaacatatctgttatcgttgttgtttctagaggaatggaaccaaactaaggggtttgggatagaggagaaaaggtttggaaaaggaataagagagaggagccaatagacttgaaaaatagcttgtatcgaattgcattttacagtgattgtgctgcactcatctccaatgctacaataaaatcaaatgcccacaaaaagaccacaaattaatgagtgatttatttttaaataaataaaataaatagggatcaaaagcagaaacttttttttttttctaatttctgtcaacaacagaatcaatgccaggacagggataaaggtggaaaatgcaaagccaaaaacaataatttagtggaaacaggaagttaaagccagaagtaaccttaaggttctaagtccttggaaattcccttacatacagagaaagccattggatttttgtatatggagggaatactggttcatcccagtctgacccaaaagttatgcgggagaatagttaagttccagagagatgtagctaatgtctgagtatctacttagtggccacagacattgaaaatcttgaaaatgcccaaatcttgaacttgagcacttcagttttagccacaagagtgaagaggtagaccagcagctttcctaaggcctcagttgatgggccttgccttcagtccttcataacctcaggcagcatcatcctctgtgcccaacgtgacctctgctctattctgtgcttcacaagcttaatggacttactttgtagtagaccactcattcttctacagtcttgattgtatggaaagagggaaactacagtagtttttttctgtaacaattgtctgctgttattttctgtacatttctctggcattcaccctgaattcattttctggtcatgcattaacttacattctcccgtggggtctcactttccatttagtcctcctgttcctagacttgatgatgtttatctgtgttgtctggtatcctactagtgacaggtcctgtttatcagtttgctaattatcacacagctcagccacagccttgtgaaataaacatactagttaagtatggtggtatgttaaggagtaaaagtaaagtctgtgagttgcatacttagaaaccgtgacaggaatttatcgcttcattctcattgacatttatgttgtggtagatgaaaggacagtctgacaagaagagagcacgtgtttgggaatcagatattcatacacttgaattttatttttaccccttactaactaatagctatttaacggccatgagccttaattcccttgtgaagtcaggatggtaatacttgactcatgtgtgcagttataagtaaaaggaaagcaccctctacatgataactttcacatgataggggtatggataaattatgcttgcaatagcatagtcataataatacttttaaattagtgactcacttccaagaatggagtataggaaagtgaaaattgtaaaattataatgaagaaacctggcagaaacctctttaaccaagtttcattctgttttctacttctgtgttagaatgctggagactgtgtaatttatagaaaaaaagaaatatatttcttacagttcaggaggatagggagttcaaggtggaggggctgcctctagggagggctttttactgtgtgatgcagaggctatcacatgatgagagggcaagagcatgccagctcaggtctctctttatcttcttgtaaagccacaagttccaccatggggcctctaccctgatgaccttatctcatcttaattacctcccaaaagccccacctccaaatgctatcaacatatgaatttggagattaaatttcaaacaaatgaaatttagggaacacagaaacacattcacacaatggcaccaagttatcaaggtgaacatcaccagtgataagtcatgtggctctactctacttatgtgggtgtgataggaagggcacttcacctcgttgtttttcccccaaatttatatcctcagtccaatcacaaaaaaacaccagacaaattcaaattcaggaatattctataaaatacttgatcaggaatcttcaaaaagcatgtaggtcatgaaaaacaaggaaagatgggaaactgtcacagatcagaggagacagcaagtaaatgcaacctgggaccctggattagatcttagaacagcaaaaaggatactagtaaaaactgatgaaattcaaataaaatctgtagtttagtaaacggtattgtactcacgttaatttctttgttttaacaaatgtcttatggttatctaagatggtaacatggaaaactgggtgaaaggtatatgggaacttatactatcttgaaaayttttctgaaaatctgaaattattccaaacaaaaagtttgttgttgttgttgttgttgttgttgtttaaactgaaaaggaaaaacatttggtaggtaacagatcagtggttgccaggggttagggtacggggagcataagggagattttaggggtgatgaggctcttctacatcttgcttgtgattatagttatttgaatctataaatgtgttaaaatgaggacaccaaaaatgtcaattttaccatatgccaatttgtttaaaataaaacaaaataaaagaaacaaatgtcaatgggaagcataagtactttttatagtaaataaggcaaaaggggaaaatgttggccgggcacggtggctcatgtctgtaatcccagcaccttgggagactgaggcgggtggatcacctgaggtcaggagttcgagaccagcctggccaacatgttgaaaccgcatccctactaaaaatacaaaaaaaaaaaaaaaaaaaaatagccaggaattgtggtgggtgcctgtaatcccagctactcagaaggctgaggcaggagaatcacttgaacccgggaagcggaggttgcagtgagccgakatctcaccactgcactccagcctgggcaacaatagtgaaactccatctcaaaaaaaaaaaaaaaaaaaaggttgggtgggaaagtttatagacagtgtaaaattgctgccttctttcttacatataacactgtcatcatcaaattgaagaaaccttattaaatatatttattctttcctttaacaaatattcattgaatcctaatggtgtgtcaagtactgtgctaagccttgccagtagacaagaacttgatgtgttctagatgttaaaagaagcccttattccaagataggccagcatatactattaaaaagttattgcatgaagtcagggtgtagacatatcgggggttaaacagacatgaaatatttacatgatatttcaagataatgttggtactctattaaacaaaatgaattatgatgacataagttaagaggagacttaagacagccttggatgtataaagaatttttgtgaaggaggtacagagaacttgcagagttttcttgtctgtaatgtaagactattatatttagaaaaggaacattgaaatttaaacaatgtaatgtttttagttcaaaagtatattaaaatacccaacactaatgagcatttagcataagtaaaacactattgtaaggactttacatatgttaacctacatgattctcgtaagaattttagaagatagatactattatttcccctgttttatagataaagaaactgacaccaagcatgtaatgtgcctaagatcatacagccagtaagtaagaaagccagaatttgagtccaggtatttgactccaaagcacacactccaccatactaaatacatggcatctatagtgatggttatttaactttcccagctggaaatagcattaagtgtttcaaatatccaaggaaccgtgtttttttttttttttttttttttttttctgatkgaaaatacaactggttataacatttgtttttttctggaagcaratagcctttgccatgccttccagttggcaccttgccccttgctaatatgcatggatgggtgccttttgctttgcagcctgccagtagaacgtgaccttggcagcccggtgtgccagccaagattccagaagagcgaaagtagctcttaacttcttgaagaaactctttgaatcaccaactatgccttgccatatctgtccacatggtactagtcctttcacaaggggctcccaagctaatgactctaattggggctcaactgtctctctaatacattctttccttaattttatgtttttctctggttggaatttcctaatgtctaaaatattccattctgtgttactcagcaacgaycttatttgcttgcaagcattgtggtgacaaacataataattaattatgtggaattttgtttagaaatatttttgttggaacagaaacaggaattctatatctgtacagtgactgaaatacaagggccctctctaaatgaattatgtgtttaaatgttcagattttatagtctatttaatcctgtaaatcttaataataaatttgatggcaagcagactgtgagtggaattttagataacaacatatgttcatagtgattcatgaaaatgtaatcctttatggtaaatctgtattatttataccaaatctttctctctggcctagaccgcttttttaaattccagacttcctacagatatatccatttagatcagggtttttgagatttgatgctgttaacattttggactggccagttctttgttgtggggtgccatccttcccattgcaggatgtttagcagcgtctctggcctctacgccctagatgccagtagcacaacactccactctgtggtgacaatcaaaaatgtcttcagaagttgccataagaccccggggcaataaaatcatctctattcacgaaccactgatctcgatgttctataggcttatgaaaaatgacatatacaaaattaaactcattttccccttagagcttctcctacagaggggttaggagcatatctgaagcaaactctgcctccctgctttgatagctgtggaacttgatcaaattaccaacttctctatacctcaatttcctcatctctaatataaataccttaataaaacctccttcatatgactgttaggaggattgaatgaactaatatgtataaaacatttaaagcagttcctggcacataggatgcctaagttaatatttgaataatcaattaatactattaaatgttagcaatagtcctacagtacaggaaaattctaagatttttctttgtatagaatatgtgcagatacttttttaaaaagattaataagtgacagtaaatacatgcaacaaagctcaacatcattaataatcaagaaaacacaaaataacatcatgatatataaatctattaaatttggaaatatttttaaaaatacttcatattaataagattgtggcaaaaggccctgtactgtactgatgggagaatatgtgtctgttttctttctggaggatcagttaccactatgtatcagagcattaaaatatttatagtctttcacagagttaatctagctctagaaatttatcctaagtgtgtaatatgttaaaaattaatgaagtatattaattactgttatttataatggcaaaattagaagctacctaaaatctcaataacgggaatgaagaaatagctcatggtatatttatgtcatgcaatatgtagatatcacattttacaaataataaattaggagaatgctccgactatggtaattcttagttcaaaatgcctccatcactttcaagataataatagaaatatttaagtgtgcattatcatgcacacataaacatacaccttttaaagttattttttgacagaccctgtgtatttatcgagtcattttttctctctaggtttccttccaaattctctacccacacaccttaagagattctgatacatcataaatagagggacatacatctttacatgaaaacgacatggaagattttctgagggacatgtgaatggtgaatttgcatgatgtggagacccaaaatggctgaggactgctgctcagtgccccagctctgttcactcgcctagagtttcctcaacaagccctgctgcttctgtcttctgagctctgacccaccaagccatttcctctacttggagtgctttccttccctttctgcttttcccttctcaaaaccaagctaaaacattgcctgctctatgaaacttatcctatcaccctgttcagatgcacatgcctttcttctctacttttgtgacaccacatgcagatctgttcatcatattttctggtattcatttgtttaaaaatatgaattgagataccactaaatgccagatgctatattaagtgctaactacagtcttggtgaacaaaaaggtaaaattttcctgctctcgtggggcctgcattcttatggaggagatggaatatattttttaaaacataaaatctaaatttattttgaggtgattttgatcagcacctcaaagaagcaagagggtgaacagcagtaatatctgagggacaagcattctaattatagggaacagcatatttaaaagtcctggactcgttcagtgtattttaggaaaaaaaaaaaaaaaagaaaagtggcttacaaggttgagactagcagaagtgcagcaagaaatgtgaccaggaagacmccaagatgctgtatgataaagtcctgaggccactgtaagatctttggattttaatttaagtgtgtagaataacatgatcttatttacgtagtaaaatactaagaggcaaccttctggctgctctgtaagaagggattgtaggacccaaagtgaaagcaggatggtcagctagaggctgtcatggtgatttagctaattgatgttgctggcttggatctaggtgacaacactggaggtggggagaagttatcagatttgaaggatattttgaaggtagagttgataaagatctcataggtttggtataggttaaagaaagctaagcctcaaggacaactctttaagttttgggcttcaataattggatggattttggtggcactttggtgaatgctgagtgaaggacatgtttaagaatgaaaacatgttaatagattctggctgtattattaggtgtgagatgccaaccaggcatcaatgtggagatgttgaagggacagtgtttaggaaaagggtcagaacagagatatgtatttgggcatcatcctcatatagatagtacttaaagttatgatgctgacatgcctaccagggctgtgagcatagtctgtgaagatacaagttctgaggtctgaactctgggacactccaccatttagggagcagaaagagagtctaacaacaacaacaaagatgagtatgagtggttaatgaattaagagaacaggaggatgtggactattagaaactaaggaaagacagtatttcaggaagggggagctgatcatctaggtcaaatacataaagaatttaccactggatttgcattgtggaggtcattgccaaatggctacctttgtcagagccatgatgctattccttggcaaatgttgacttacttatctgtttcttccaggaaacctgtgaacctcacataggagtgattttgccctccaggaaacctttggcgatatctggagacatttttggttgtcaaaactgagcggtggtggagtgatgctactggcatctaatggatggaggcacaggatgctgctgaacatcctgcaatgcacagagcagctcccccacaacaaaataatgatctggctccaaacgtcaatggttccaaagttgagaaatcctgcactaaacgtatggttcccaaagtgtgtgcttagacaccccagggtggacataggagtgccgtaggacattttaaagtgtgaatggaaacacagtggcatctgtcaagcactaaatgaactactaactcaagatagttcacagtttcaacattagctttctttttttttttttaaataatgtctctttgtaaaacttggttttggaagttgctgtgataagaatcaaatacttggtgaatatcactgtggaataagaagtgagaatggcagtttccaatctgacttcaaggtttgtgaagttgggtagtgaccagaagttgttgagtttttaggacgtaaatagttattaaattgtttggacttgacaactcaagaaactcaattattaggtatatcttttggcctagggggtgtagtaaaaaattatggatatgccaygggcaccataaagcagaaggcttgaaactgctgggcttgactttaagttccttgggaataggcattgtgtattagtactttatatctgcagcacccaaaacagtgcctgctacaagtgtgaggtgcgagaatgccaaacagatatccataaggagattgagggaaatttaataaatttaagaaataaaatggcaggtatgaaatgaatgaaagggcacatgtgcactgtagtgtcaagagaattatatgttaagtggcaaaattcgacctactggttcactatgcactacaacatccctaaatacctccctacttatataggataaaataagagaggggaaaagaatraagcttgactttcttattctttggcctgtgaatctctagactaaaatttcttgagtttggtgcaagyttacttcctcagattacattattttttcccaatacaaatttctattctcacttatattatgcatattgacaaaactgtgatcttattctgcaggaatatgtgaacgggagtaatttgaatatctcctaaatttttggctgcttttcttcctgccccttttgccaagcactacatgccctagcctaatgattgcatagatgttggaaagagatgttctttttagagttagtgattctattttgtttttgaaaaaaatcttttcagtgtaagaatatgatttcagaatataaacttgtggaaatattcttggtatagtggcaagaagtcagcttttagaatgggatatatagtcccatgcatctcactctcactgggtcacatctggatcaaggcataaggtttctttgactcttagatttgtcacctgtaaactcggaatacgaactctccaagttcttatgaggattagactagttagctgatgacaagtacctatcacagtgcttgacacaaggagatactcaataaattatagcttctccttatatttcaacctgacctatcctgacaccttctttctccttctcattctcttagtcttttgtttgactttaacacctaggatgaagcttatagaacttattaccattttaaaataggcaagttgtttgctttgttggtattttgtgttgtatagtgatggggtggtattttccctattaataatgtagtgcatcaacaaatgtaaatatattcatagaaagttctccagcagggacagagttggagaatcgctgagtcaccagtctcccctcacctgagagtgttcacagtgaaacttctctccgttgtgtgttttgtggccttgcttatttgcaatggtctgtcctgaagaatttgagattagagaccccgtggataatcatattccaaggtcaccagtaaaactaaatttctgtaatagttataacttctactaaatatttttgctagagcagctaaaatgcagtctgcctgtgaaatctggctgacttaccttattcagcctataaaagttatgtttactctacagtgtagtcatttaagtatgtaacagcattagcctaaaaactatacatactttaattaaaaattactttattgcttaaaattgctaatgatcatcttcactgagtcacaaccttttttgctggctgagggtcttgcctcaatgtcgatggctgctgaccaatcagggtggtggttgctgaaggatagggtgactctgacactttctttttttttctttgagacggagtctcgctctgttgcccaggctggagtgcagtggcacgatctccgctcactgcaagctctgcctcccgggttcaggccattctcctgcctcagcctcccgagtagctgggactacaggcacctgcaaccccgcccggctaatcttttgtatttttagtggagacggggtttcaccatgttagccaggacagtcttgatctcctgaccttgtgatctgccctcctcggcctcccaaagtgctgggattacaggcgtgagccaccatgcccggccgactgtggcactttcttaaaataagacaacaatgaagttggctgcatcgattgacttttcctttcatgaaagatttatctacagcaagtaatgctgatgtggtttcatagcatttgacctacactagaacttctttcaaaattgaagtcaatgcttctcaaaccctgcttctgctttatcagctaagtttatgtaatattctgaatcctttgtcatcatttccacagtgttcacagcatcttcaccaggagtagattccatttcaagaaaccctccttccttccttccttccttccttccttccttccttccttccttcctaccctccctccctccctccctccctctctccctctctccctctctccctttctccctccctctctccctccctccatttgcattcacaattttgtggtttggttcaagaggccttgctctccacctgtcttggctgtcaacatgccttcctaactcagcttaatcatttctagctcttgattgaaagagagatgtgcaactctttctctttcacttgaacacttagaggccattgtagggttattaattgccctaatttcaatattcttgtgtctctgtgaatagggagacctgaggagaggcagagagtcagagactgactgctggtcagtgaagtcggaacaccacacacaacatttacagattaagttcgccgtcttatatgggtgtggttcgtggtgctccaaaacaattacactagtaacatcaaagatcactgattacagattaccctaacagatataataataatgaaaaaaaattgaactattgcaagaattacaaaaatttgatagagacataaagtgagcacatgctgctggaaaaatgacactgacacacttgctcaaagccgagttgccacaaaacatcaatttgtaagaggaaaaatatctacaaagcacaataaagcaaagcaaaataaaatgagatatgtctgtagttgtatctggtatgtaattagctcttggatttattgctttaataagtgtatgtgagtctattggtgtaaccttcactatgtaaaaaaagcaacacttttgtaacacatttatgacaaaggactcatatctaaaatgtataaataactcaacactcaacagtaaaataaacaaccagagcaataaggaaatgggcaaaaatattaaaagactgttcactgaggaggatatacaaatatcaagtaagcacacaaaaatgtaataaatatcagtgggtaaatatatatatctctatgataatagctrgaattcaaattataatgtcaaatgctagtgaggrtgtggataaattggagcgctcatacattggtattgggaatgtaaaatgatactgctattctggaaaatagtttggctgattctttaaagatataaaaaataggccaggtgtggtggctcatgcctgtaatctcagcactttgggaggccaaggcgggaggatcgcgaggtcaagagatcgagactatcctgaccaatatggtgaaaccccatctctactaaaaatacaaaaattagctgggtgtggtggtgcgtgcctgtagtcccagctactcaggaagctgaggcaggagaatcgcttggacctgggaggtgggggttgcagtgagctgagattgcaccactgcactccagcctggtgacagagcaagactctgtctgaaataaataaataaacaaacaaacaaatttaccatataagccagcaattgcacttctggaaatttgtcctacaaaaattaaaacttatgttcgcacagaatattgtgcacagttgttcactgcagctgttttcatttgaaataactcaaaacaataaacattcacagtgtccctcaatagctgaatagttaaacaaactgtgtggtacatccatgccatggaatactgcattgcaataaaaatgaatgtactgttgatacagacaacagcttggatggacctctagggcattatattgaaggaaaaaaagccaatttcaacagtttacatatggtatgcttcaatttattaacattttaaggatgttaacttcctgattttgatattgtactattattatataagatgtaaccattggggaaaactaggtgaagctttcacaggattcctctttgtactacttttgcaactctccaagaatctataattatttcaaaataaaaaggtggttttttttttttggtaaagtcatattttatgcacacgcacacccacacccacacatacacacagtttcttatggggaaatgttattttgaagtaaattgggaatgtaggcatttcatttattctttccaaaatcatttgtttctacttttgcaggattttttttcttcttcctcctctttctctcccttctccctagttcttttttttttgtaggatactgagatagcttacttttcttgcttaggaatgccttcattttttggaaaggcattctttattttttttttaccattttcaactcaattttagttatttaattttcctgtcattataatttggatatataacttctttgagaagtgcagatcatttcatagctatctcattctttataactcaatctttttgttttttaacagattagaacctaaagcagagaaagttagtgatagaaagcatgaagtagagtaacaaaactgaaaacagccagttgccctaccaacctgttctgctctattcttctattttttactgtactatattcgatcccatttttttcgttccattctatgttatgatttcccaacctatatgtattccattcatcctgttctgttccattctatgcaataaatatttaatgagtgtttagtatgtggcaggtgttagtctatgtggcttggcatgtaccagtcaacacaacagataaaaaaattgctgctcttctaaagcttacattacaagaggaggagacagaaacaaaacagacttaattygtaagtaaattttagaagttagtgagtgctatggaataaagaaagagttaagtaggtgggggatatcaggtgggaatggagggaaagttacaattttcaaacagggtaaggtgtgagaaactgtaaggaattttgccataaattgatctgagcgatgcattttctgatcactaagaatagcaaggccaaaggcactaggatgtgagatgcctggaatgtttaagaaacagcagggagatcagagtggctggagtagagtggtgagaggagagtaggtgcaggtgaggtcagataggaaagaaagatctgactacaaagggcttttgaaggtgttggtttttactctgagcaaaatagtcagccatggcagggctttcagcagaagaccacatgatctcaattatagtttaggaccctagcaatcctgttgagaaagacattggcttattctatactcttagctgtgaaggtagagagaattattattcatattattaacaacaaccacatacaycaaaaaaccctcaggatattttgaagatagagtcaaagggatttcctgatgaatttaatacagattgtgagagaatggaaggggtaaaacatgattccaaggatttgggcatgagcatctggaaggttagtgttgccaacaaccaatatggagaagatggcatatggagcaggtttgagggggaatgtcaggagatctttttttagatatggtaactttgatatatcttttagacatacaagtagacattgcttgtaggcaggtgggtatatgagtctggagttcatgaaagagatccagggcagagatacatatctgagagttgccaacacatagtgatatttatcatgagattagatgaggttaccgaggaagtgactataggtggagaagaagaccaagaactaaaccccggggaaccagagttaagaagtcagggaatagacaaggaaccagaaaatgagacaagaagcaactagtgagatagaaaccctgacaatgtgtgtcctctcagccaaaagaagaataagtatcaaaagcgatccaattactaaactgtgtctcttacctcagtgcaaatgtgtatgatgtgattcaatatcttcctgtatccctaattttatttttattctatttttatactggaaaacaggatcattttttgtttgaaatttagcctgctaagaaaaagtagactttgttgttattgttgcttaagtttcaaacagaatcaacattgtttaaaattgttttaagaactagatttggtgttaacagtttttctgtggtgagtctgaatttccttgagccgttatttacagcagaaggtaaccactacacttattctaggaggctggattgaaatgtattttatgtattattatcttaggaaaaagatattaagcatcttatctttattatgatcacatttgttattatcagcatcttctatagatagtactttttgaggctacatgttattgtggacttgtgcatttttaaaagattaagcatttggcttggaattatcaagtaatcctgtgtagtaactgtgattaaaattatacaggaattcatttcaaactgtgacaaatatattgtagcttacactcttattgaatttgttcatatattttatcaagaatgtcaagtatttttacattaggtttatgtaggtttataggtggaaatataaattattagtaatgcaaattatgatcttgaaaaagtagctagattttcaggttttccttttttttgagcctgcagactatttggaaattaatttgcatttttttggtgtgtatttatattgtcttttgcttatattctgcattacaggattctgagtttccacttaatgagtaggctttacagtacccacaaattactgcaacaaagttaaaaaaaaaagcactagaagcctaatgaaatggactgctgagaacagagctgaataaacacaagcttccctttttgcagtgactgttccaaactaagcagaagctgcttctttatttcagggaaggaaaaataatgacccggttttctttatttttctggtgagcaatttaactgctacctccatttggcatattctcccacttcttttactggaatgggctataactgtaggtatggcattctttgccacaatgtatattttccttactgcagtgtatattttgagccatatttaccaacacagatatttactttttctctgagatgtggtctagaagcaattgttcagagagaaattcaacactgactctagaggtaaacctgtacccggcatttcagtgtgtatgtgtgtttgtagaattatcatcaaagagagaagattattcttccagatggcatttaccttaataaaaactgctaatatgcacaagcttgaaaaccatttctaatccaagtgtactggcagcgtgttattttcaggagtagttgcattaactctttgaaccttttaaaaaaattatcttctacttttgaactaggtcttttgaaagataatagctatcctaagtaagttatcctttgagtactgtgcgtgtgcacctttgtgtgtatttgtgctgtgcgtaaaccattgtgtattttggcatggcccaagtcagcaggaaggctccagggctgaggctgctttcatcctctgatacaccctcacaaccttcctgttttacgataattctgaaacctaacgctcctgctacttttaactcagaactgtgtttatttgcctgtggcctgttttattgtaaaataaaaaccttaagaaccctatgtttttagggtgcttttcccccctcaagaacactgtggttgtcttaaagcctaaatgactgtgttttaatgatgtgtaaagattcagtaaaaaataaatcatggcaattttgttttaagaagaaacttttaaaggcaatacgtgctgcagacttcaaaaagtctaatcaaacaattaagaacaaacagtacttgtgtgaacttatcattttattctgcacttttcataacatattaggtgttaagcttygaaagattctgctttaattccgggtaactattggtaggggatttaagtcacaattatttaaacataagtttttcacagatcttgaatgtctctgggaattttctccccgaggcaaataatagagggaattaaagctgatttgttttctttgccaattgaaattatgagataggtggctgccactgattttatcttacctacgagcatcctacagccccttatgttctggtaatgcccctgatggtgatgcatagtaaatagtggagtaaattagaagagagttataggtgtgatgggagtaatggataagttaaatgccgtctttatcctcaagggacttacagtctggctcagtatttcttatgaagggagggtgggacactattggcattttaggtagggcagttcttttcttgtatggaaatgttccacacattgtaggaagttaagtttctctggctcctgcctagtaattattagtagcaccgttagttactgtgacagtaaaaaataagtccatatatttatcagatgtcctctagagaaggtattaattctaatccttcttccttagaacagttggaagatctgaaatatacactatatgcataagaagtgattatagaactgtattgtctatattgtcgaaactatgttaaaggaatgatgcataccataaaagcgaagaaaagacaggaaaaaaaaaggctggttagttgcctctgtgtacaccaactggtattacagatcacttttttttttttttttttttttttttgagacggagtctctgtcatcacccaggctggcgtgcagtggcgcgatctcggctcactgcaagctccacctcctgggttcacgccattctcctgcctcagcctccggagtagctgggactacaggcgcccgccaccacgcccggctaattttttgtatttttggtagagacggggtttcaccgtgttagccaggatggtctctatctcctaaccttgtgatccacctgcctcggcctcccaaagtgctgggattacaggcgtgagccaccgcgcccagcccagatcactcttgaagatcatgctgattcttctgctgtgactatcctcttctgtctccctccttcttttttttctgccctggataactcctacttaaccatcaagataaactaaattgttataccttccaagaagccctcatgagctttctctcttcttagactgggtgggatgactatgaacctggttcttacaaatcattgggtgcatctctgtcactgtcttctagaattctattgacatcatctgttaagggtcctttctatcttctcagtagcttctatgtgtatattgcaggcaggaactatatactacatctttcttacctagttaaattctatgtgtgaagtgcatattcaattaactgacctgaacttggcagaaacatataaaattgtgtagttgtatagttgatgaaaacatataaaatgtagtttcattattttttgacatcaaattaaaattctgttcaaaagtctcctttaatataactttgctcatttaaaaaagattcttatgccccactgttggaaatataatttggtacaatgcttttggaaagacatttggcagtaggtatcaagagatttacaagttcatggtatttgattcattaattccatttctgggaacctctcctaaggaaacaattctaattatagaaaaagcctgatactcaaaagtctgcatttcaaaactgttactaacagcaaaaaattccgaagtcttcaagaagtctggggaatgggagcttggttaattattgacaatccaattctaatggataattttgggacaattgtggggaattgtgtgtgaatatgatctggcttttagatgtgatgaaattattctgaaatagatggagattgttgaccccccaaaataatatagctacaatacaatatgactatattacctcattttagtatacacacggagacagacacaaacacacagatgtgtgtatatgaaaaagatccaagaggatatactggatcttagcaatgctaacatctgggtattaggaattggtgttgatattttctgtattttattatttcctaatttctacaatacccatttacagatgtaataataaacgatatttttaaaaaacaaggaatcgaaaataatttaaatgttcattagtaacatatggctaaattaattattgtaggtctgtattctaagttatttcattatattcaaagacaatatgagaaatttttataacatggcaaaatagttgtattgtagtattcagtgaaaagagcaagatgaaaacctttttacataggttggtctacactccaaaagtagatctcacagtgatttttttctacatggtaaaatcttgggattttctttttattttcttgaattatttttctttagtaaatatatctttttaattggaaaaataaatatatcatcaaaaattctgttaaaaatgttcatgcttcaaaagtttcaggttattgttggaggcagttcaaaaatgttatagctgtgaatcatggctgtatttaaatacaggtagcacttcgtgttagaaatatgtgttgggaggggtttatattgtgtgtttatgtaaagatagggtaagatttcacaaacttcttatagacaaaaacagttacaaagatttgtgtcattttagcataaaggtgagttccttaatattactttttattaaatcatttattcattccttcattcaataattatccattgagcaagggcttgggtgcccaagattcagaaataagaaatgtagtaggaaacaacacctaaaattgacttttctctcaccttttgggcaaaaattggaagacagttaaattcttttacgatagcagtatcctatgtgatcaaaaattcaaagcgtctttactatctaaataatgtctattgaattttcagatgttctctcagctctttaattaagttcactaatttctgtctcaatccagtgttgaagtcagcagccaaatgccacatatggaaaaatgttcctctggaagtaaattgaatattttaaaaattactgtcacttatcttaatatttaactcaataaaacttctgtttctcagtgtttccccacacattttcatgtgtctgttaaattgttggtaatgctgcatacataattccttggaaaactaaatggattctctatcatttagaagagttttgggggtaatgtggtaaatcattttttgagttgggtaaataattcttttgagtaattaagtaaatctaatgagtgctgtttaattgcttattggtttattcagtcttttatttgcttcctgtatggcaagttcagaaacctattaatattgctatttattgagagggcttcttaatatcttttaatgagaaaaatacctggtgacagtttattagggaattcagtagattcaagaggaatttttaaatgatctcatttgtattttagctataagttaggagacaaggttctgtgctcagattcccagctactgcaggaattgtatgattgtggttatttttaaagccagaagacgctcttttggagttctgttatttcaacaatctagatctattctccatgtgatattgacttaaaatttaaaaagcagatgtaggtcaaaggagattctgcaaacacttttgctgttttatcctggggctttgacaactttaaagcaatgatgagtttttttttttttttttatatctaaccttaatcctcctggtatactttaaagtcacctctccctaagttttctttattacaaatgtaaataaaaatgggattgttatgtgtgttctttattttagttatgttatctgtttcatctataatatatagagatataaacataatatttcatgaaagatagactttatggagaatacacagaatctgttactagggatttctactagtagtagtagtagaaggggtgagaaaagggaatttttgacctttttttctcttgtatggttaaaatgtcttgccatgaacattgcaaattatatattataaattacttttataatttaaaaatatattttatattgtaaaatattaacaattataatgatattaagtattataaattatttttataatttaaaacaaaaatgaaatattatttatatacaaattgttggtttgtattaggcttttggcatattaggggcttaataaatatttaattgaatttcagcatgtactaacatatatttttctttttacaagtgagcctactacctgctgaacttgaaagaatctagcatttaaaagttctttaacaatataggaaacctagaataaacaagcataaagactttaaacatttttaaaagctgtttaaagaatgttcttatattggttagcctttgggccccaaatacagaaagcatttattttcattttaaaaagggcccccaaacaagacagggctaataaaccagttataggatacagctttttttccatttagaactttatgcaatctgtcatcttctctgatccatcattattaatggttagtcttctcatgttttacatactttattcttagaatcctcagaaaacacactcatttttcctgctactaaaataaataaacattgcaatttattcctaaatatagtgtatttccggttattggtgtttctttcataggccattggtaagtgaaggaactacagagaaataaggggtaagaggaaataaaaatgctatctcaaggtctttgttctgccaaggtcatctaaaagctacacagcagggttcatttcaagactacatttcagggttagctcactaaatgtatccaccatactctacagatggggaaactcaggttgtgcttagcctaacatacttggttctgataatgcttggttctgataatgccaagatgataaatagatttagtccctctattgtaacatttgtattgaatatatgggttttgtaggataccaccagaaaaccaactttaattgctttctcttctacccattcaaactagcactgaaagagaagtctgactcactgaccaccacttgagcacgaacttttctggcaacattcagataattaaaagtcatcaaagcactttagcctcaaatggtctcgattcagtaattatcaatgtaatgacgttttcttcacagtaaaggtttctcagattcactagctcaaccagctgcatggatacacctgaaacagaaaagaatggcatggtcagctttgctgtttgccccagcttttgtgttccatagctgctttgccagcttgttaagagtggtgacattgggaagtgaggggaacaggtaaggcagggaaatgccttccatgttgggtgaggtgacatccctgttttggactgatgattaaagctgcctctttttctggtggatgcttacccagggttcactcatctacagttccctgaactaagtgaagcatcccccgactgacaagttacaacttgttcttcacactttggacattagtctgtacacctccagaatattccttctgaattccaactaggtgtccttcatgggcagattctaagacagcaaagcccaatagtcttgttctccctctctcccggcccagatctgacccacacaatacatacacacaccttcgtcctgctgattaggtgggtcatctttgcccaagtgtgttcaatcaccttcttatccttgatgtttatactttagatttctcaggcttgagtgagaaaccaatcgatcgtatctccaaaacttctggaaacatatcaatctctctaaatgaattctctgaagtcctttttactaatgttaaggtgagggacaagcaagcctgaaccatccctgaggaggagggggtagggacatggaagatactgacaactctctctcaagacattccccatctcttttttccatctctttgaccggttttactgcagcccttttatacgttggagtttaaggagctaaggcccctacactggtgttcagttattcccttttcagcctgcataggtggtctggaatgtgggagtagttgacacctactttcctggggtctcagccaaatgaaaataattatttagtaacagctttgggaatataactttttcacccttttctgtggtctctgagatactttttaatcctcaaatattatattctaaggtcttttaaaaatgtctgtatgttagaagcagtaatgctggctataccacctaaatataagtcttacactaaatgtgagtcaaattgacccaaatcctaaagtcttcctatatttgttttgattactcattcacttgaatagataatacatgacatgatatgaaagctaagataagcaaaagactatataatgaaaagtcttttcttctgttgtaaatcttagtcatgtttctctttccaagaggcaatttttttattatttttaagattcttatttcaaacatttctggagatctcaagattcatgtggagaatataaaaaataattgggctcagactgatctgacataatattaggtatatgttatctgtcagcagagagatattgagcatggaccataactgggctcactcctgctattctacctgtgagttagaaataatactaaagacctctaggagttgtgagaattaactgagaaaaatggatttaaaggaaatagtagtttctgttgtagaatattcactctatacatattaatttcttaaagtcccaacctctttgtgatgtcgtattagtttctgcttactccccaccctcaacactaaccattgtgctaccaacatcccctgtatgcctctgtgacagctgcttggtttcctgcatatactcacttccaaaaccttgttgtgtaaagtgtgcctgttgtgccccgtgctcatctctgacatagcacttcttcactacagtgtagtggaatatgcgtttttctcttcaacttagtgccttgttttgtcactcagcacagtgattggcacctagtaaacagtatgtatttgttggacgagtgagtgcacaaattaagcaccctcattaaaggcctgttctgttttgatagagggaacgtggacagaggtgaagcattttgatgtggggaattgtggggaccatagagctagctcccctggaatcagagagggagcattagcttggtagagagagagaatatgttaaggaaaaggcaaggggcaaagtcagaaggccatgaaggtcagataacacatctggaagtttgcttggacctcaccttgtcccgtgctctcctcctggcattaggaaatgactatcttattaagacactggcgcctttgaaggataccaccgatattcttacatactgtatcagtcagccccagaaagcctttggtgtcaggggataaaaagaaacaacaacaaaaaaatgaatcatttttctctcactttcaagtgattagaatagaagaaatagaaagatccattgccttgattaaaagaagtcagttatttgtggtggcattttaagtggatgctttcgcatgtgcttctccaaaagaagctggtaatagtatgtattgaatttaaatgtaacctgaacggctagagtgagcacactaatatggcattggcaacttcactgagcatactttaaaaattctaaaggaatatgccaattccccagagattatcttcatttctgaatgaagaaatattttgttctgtatattaaccttttgttatgcctagagctcagtatatctaaacaatttaattagattattttaactgctttattgagataacatgaaattcacccatttaaaatgtacaattgagtatattttagtctattcacatggttgtgcaaccatcaccacaatctaacatagaatactttttaccctttaaaagaaaccccagacccattagcatcaattcccattctcttttccatactaccagccataattaatcactaatctatttttttatctctataaatgtgcccattttggacatttgatataaatgaaacgataccaaatatgtggtcgcttctgactgccttcctttactcagcatggtttyaaggtttacccatattgtagcatgtaactcagtacttgtttttattattgctgaataatactccattgtttcgatataccacattttatttatcagtgaatcagcagatgtgtatttggattgtttcgccttttggctactatgaagaatactgctaagagcattcatgtacaagttttcgtgtggatgtctttttgtttgcatatatctagcagtggagttttgctggctcgtaagtacttgccaacacttcttataatacatctttttgattatagccattctagtgcatgtgaagtggtatcttatttcagttttgatttgcattgccctgaagactaaaaatgttgagtgattttcaaggacttattggctatttgtatatcttctctggagaaatgtcttttcaagttctttgtctgttttttaattgggtcatttttattttgattattgagtcgtaagattttattttatacactctgagtattaaagatatatagtttgcaataattttcttccattctgtggattgatggcattattttcagcaacaattttaattttgatgtagtccaatttatgtgtttttctcttattgcttctgcttctgattttgttacctaataaaccatagcttaatccaaagtcacaaagatttactcacgtattttcttgtagttttaactcttaacattttaatacgtgatccattttgaggttttctgtgtgtatgtgattagttgtcccagcaccatttgttgaaaaactgttattttccccattgaaataacattcttgtctaaaattgattaaccataaatgtaatggtttctttctggattctaatttctataccattcatctgtacatctgtccttctgccagtacttctttgttgtattattataactttgtaataagttttgagattggaaagtgtgagtcctctatattgttcttccattctaaggttattttagctatactgggtctcttccatttccatattaactttaagattagtatgtcaattgccaggaaaaaagatggaattttggtagggatttcatggaatttgtggatgaatttgggtcatattgctatcttaataatattaaatatttaacctatgaaaatgaaatgtttttcattcgtttagatctcctttaatttccttccatacagtgttgtaatttcgatgtacaaggtttgcacttttgttaaatttatgcccaacaattttgttcttcttgatgtaggtcatgttttattgattagttatttattttggttgtatttactgatcaaattttccaagatttcataaatatattatgatatattttgacagaaaacttttgtgatggctaagaaaggtttattccatttatgtgctcccatttttgctctcaaatgatgttgcccactgactttaaaattaatttcaaaaagttcaatgtggccgtaatagtgctattataatctcagtatatcagtgatttttaaaaacggatttctacttgttttatacaattggtcttcaaatcctgctattataccttgaaaatgtctctcaaagtcatctttttttttccatcctgtgttaagcatttgaaatataaaatatataagcctcctccaaaaatatataagctccagttattcaatggttatgtttttgttatcttcttttgttgttattgttagcttattttagttatttccccattttccatcccctaatatcttttactcagaaaattttcttataacccctacaggcagaattaatttttcctgtttctgtgattacacaatgtatttaaggtgtttagcacaatattcgttatagagaatagtctcaaaacatggcacctgtcaccatctctagttatctattcaaatcatcagtatttgcccatatcatactctatatctttggtatgttttcttgccatcaattccctcagaaccacccaaccccccccatgaacttagattatttttttttattatactttaagttctagggtacatgtgcacaacatgcaggtttgttacataggtatacatgtaccatgttgatttgctgcttttttttttttttttgagacggattcttgctgtgtctccaggctggagtgcaatgccacaatcttggctgactgcaaccctgctgtcctaggttcaagcaattctcctgccttagcctccaaaatagctgggactacaggtgtgtgccaccacgcccagctaattgtttgtatttttagtagagacaggatttcaccatgttggccaggatggtctcgagctcctgacctcatgatccgcccgccccggcctcccaaagtgctgggattacaggtgtgagccaccgcactcggccagattgtaaattttttgacaacaatgactattctcctcatctttctatgttcaaggcctgcatagtttagaaacaaggaaacagtacagttgcaaccatacaattgaaaaaaaaaaattgtccatggctataaattaattaatctgtcctgattttatgtctgtcaaattataggtagtactaacccagtaagagctttattgataaataaatgagaaattacagttttatcaagtgtgaggtaatccctttttttggggcttgcttatttctattaagcttccaagtattttttaaaagacaatttgtattcctggctttattttacagtttggttttatctattctatttgcatactgagaggaagctggtatatagcagtctaagctaaatgaaaaataagtgcgcaattctaatattcaaaaacaggatagaagatgtccatttttatttttttattctaaataggaataatatgcactataatgtttatatttcttccaagtatcttgtaccacatgcttatgattgacattgggcctctatacctattccttttcgttaagagactacttttgyattaacattttaccattagattttattgaaacactattcaaagtcctcaaaatttcaattttatacctttttatttttctgtaagatgaagcaatgtctttagaatgttattttaagctcatctttgggcttccactgtttcctctacttgcccttattttaaactggaaaatccatgaatgtaatgaccacatcttaggctctttcatatttcaaatgcctaagccagcatcaaataaatgtattttatatttatttatttatttatttatttatttatttatttattattttgaggcggagtttcactcttgttgcccaggctggagtgcagtggcacaatttggctcaccgcaacctctgcctcccgggttcaagggattctcctgccttggccttccgagtagcttggattacagscatgcgccaccacacccagctaattttgtatttttagtacagacggggtttctccacgttggtcaggctgatctcaaactgccaacctcaggtggtccgcccgcctcagcctcccaaagtgttgggattacaggcgtgagccactgtgctcagccaaataaatgtattttttaaaaaatatcccatggtttgtttatcatataatgtaaaatcaagaatccaaatatttttcaaagggtagagaatttctgtgagtaattttttcctcagcatcttaatatccaaactctacttgctcacaagattacttaatcagcatcatatcagagacagcttgctgtgtttaccattgttagttgggccagcatatgtccaaaacagttggaatgagaaaaacagccttgacttgaagccaaattagagagggaggaggagaagagttctttagctgttgaacaggactacatattttggacagtgtagggtacttctgtagaaaaaaagaaaaaaaagggtggggaattctttcagccaaaaaacaaaggtgcattttgaaatatctaaatgcactgaaataataaaagcaaattggtgatgttgttttaattttatttatataagcctttgcaagtaatgaaatctttttatgttaaccaaaaaaagaaagaaagaaagaaaagtattctaagatatttataatgtggataatttttttttttttcagttttaccctggcaactttaattggcttagtggtttctaattctgggcaattttctgtttytttwttaagcaatgtgggagctgttgaataaccatcacatttcataggatcagaataatatttctgatttttctcaaactgggtattatattactgtatagtaaaaactttttaagtgaggaaaatrtctattcttgttttgctaagtaacattacaaaaagtagatatttttgtgcattccacccccttaagaagcaactattgtagaaagtggtgttttcattgagagagaaaatggaaagtaatattttgctatttattatggaaagttagaggagaggtttccaaataccacaatcaaggaataaaacaattttgaccacaactgaattttatatatcaggcaaagcctgtcctagggtagtttttaattagataaagctttcttcagagttcctgctttcaattctctatcatttcttatctggtagggatccygcttgcttcctagtacctctccctttctttacatcagaatctattatgtatggtggttattgatttacccaaagaagtcaatgaaggccaacagcagttgccttttgcatgagatatactttctgataaagactaaaaaagtaaatcacacrcacatacacacaatttttaggtggggagggaatagctttggcagtagaggaagccttgggaatcactgttttacctccctggttttatttgttttatacatgagaaacccaggatccatagacgtggactaatcaagactagaactggagacgcagtgttctttctgccaaattctgtttctttacattgacaaggtattgggcattagcaagcaattgagagtagactgatagagatgttaatttattcattacttgttctttaaaacaactgtatcccatgcttgtgagaatcaagcaagatgacaaaggtttgttaccaacgagtttggtaaagcattttcagaggagtgtagtggatgtagtaggtttgtactctaggacctggaggtgagagaagacagaggaaggatgtaccataccgtatgttcagaatcaaaccttccctcaggtcctgaggttatcaggtcaagtgtgtcgcaaggcctagcttcctctttgctaaagatgagtttttcttaggtggtgccttagtcattcatgcaaatagacatctgcagtgccagccccacctgctctccagacatgcccagtagtttttgaaccttggctttgagtatgtcctgcagcatgccaaatttatctcgaggggaataagcccaagtgaaccgcctacgtaaatctaaccaagacaggcctgatgtggcgggttgaatttctatgttgaactaaggaatcgcatggggttctatggctatacttctcccccctaactgggcaaggcgaggaaacctgaataacaacccctatacaagagcatttaccttagcatagagacaaattgcactgtttgttgttctctcatttcttttgtttaaccatgataatacttacctttttagcttcaagatttataaattccaagcaattcatttaaagcatttttttaaaagcttgaacttaaaattttgtataatgtgttctctagctactgaatattctactggtctaatctaagttatattataaattttgtggaaaataagcagaagccatttgattcagaatgcctttgctaagctctatgattagcaatgtatttcctatgattttgggttatataaatttaaatttgcattaatatctggaacaacatttgggtaaatatttttcccatagtttttaaacaatacctaactaccagaactatcttgcatgaagcacaaaatttctgtagtggtttgactacagatctattactagggtgatagccaaacttgtagtaktattattgcagctttgaggtgtataagatgtttctttaaaacctcaaggttttaaaacattcagaataaactatatcaacccacacattaacaaacatttaaatgtcaaataagcagaatatcctttaatttctaaccatccctttgcaaaacccattccaatgttggtttctataaaatatactggggccttgttagtttatacatacaggatatatgtatatgtatatatatatatatatatatatatgtaagcttagaattatgtagcaactgctgcacagattggaacagtctatgtatgtctttcgctataatttattaaaagaaatttcaattcaataagtatttgttctatttgtagcttattgaagggtatacaatctctgtctcatggaaaaagagataatttaggagaacactcctgaatcttttactatggaatattatacaggatctttcattaggaccattctaaattaatatttaccatattattaaatatgcaagataaaaaacactgaaaaataatattgtatatgtgacaatggcaaagctaactgtaacctgtctagtgctcattattctcgtctgtgaaatggggataatagtaaagctgtgtattcaaagagaaagtccatccaaaagtcatagctagcgctcagcatatgttgctcattttaaagtgccatcattcttatttatatttttgttttccagttgactgcgtattgtgaagagcaagcaacaaagtctaaaattagtatatcaatctagtgaaaatacttagaacttgttttatatggtgttctcctgtcatgttctatttcctaattatgttttattttagatgaaatacactatgataatttttaacctaattcattcaaccattatagcagagaggtagcttggaaatttgtttgtcacagggacatcccaccatgtgagaataaaaattgggccgggcgcagtggctcacacctgtaatcccagaactttgggaggccgaggcgggtggatcacctgaggttgggagttcgagaccagcctgaccaatatagagaaacctcctctctactaaaaatacaaaattagctgggcgtggtggcacatacctgtaataccagctactcaggaggctgaggcaggagaatcgcttgaacccgggaggcgaaagttgcaatgagccgagatcacgccattgcactccagcctgggcaacaagagcaaaattctgtctcaaaaaaataaataaataaataaaataaaataaaatttggctatagattgattctcaggagttcgcaaactttctgttaggggcagataataaatatttgagattttgcagcctgtactatctctgtggcattcaattctgactttttagtgcaaaagcagctatacacagtaagtcaatgaatgagagtggctgtgttccaattaattttatttgtaaacactgaaatttgaatttcatatatttttatgtcacaaaatattttcctttaaaaaattgttttcccaaccattaaaaatgtaacaatcattcttaggttgcaggccataaaaaattaggcaggctggatttgacccatgagccacagtttcctaactcctgttctgcatagttaccttcattataaatattttcaataatttcttatacttttgattgtacaaagaggtatggcttcaaattacagactgatatctcagagctgtgcttaaagtattgagaagcattctgtaatgctgatggttttctcaatattggctaattctataaacagatactatgagttctgccagaaatagaaattctaatgacagtctaattaaatagaagccatggagaagaattattacattttcttatgccaaattataaatgtcttcaattaatgcacagatatttatttatttatgtatatgtaaaaagtggattttctgacagcctcaggctcctctttgtggtagaaccttctgtttctctaattagttgtgccttaatggccagtaattgtcttttataatgcacagggaacctaaaaaaaaactgaaggaaaaaaaatagaccatcacagtctatcttttcaaatcttttctcatgctgtcaaaaaacagctgcctcttactttttgttactactttcttcaattaaaaagtaatctcaaaatttatgaataatacacccaaacctcattaacactgtttacagttaattatgatttagtatctctctctgtctgatataacccaatgggatttagttaatcaagtaccraagatgacttcattaccaggcagtctttacctgtgaatcagtagattcacagattggagagtacagccatagtgaatttaagaaaaacaaaaacaaaaacaaaaaaaaatgctaattgcctagactcaatagaattttgtatagctaaaagaaaagggtgaaatattaaatttggaattcttaagtacagaattgttccttaaaaagagtgctgaaatacacactttaagaaagatgctttagacttacctgaaaatacacaagtgtgtcaaaatatgaagaaatatattcaattacacatatctctgtggaatatattgacaattatgaacaaatgtttttcttcacctttaaaaacaaaaatatgtaatattattttaacaaaaacttttcagtctcatctgtatcaaggcatactccagaatgaaatgtgtagaaataaaatgaaatgcctattttgtagaagtcaaatagaatcagaatggagtggttgagatcatggactctggagctggacggtgtgtgttctaattcctgttgtacctgttagtgggtgtgtgascttggccaagctcctctgtggcctccattttcctcatttgtaagtaagaatcccaagcacgtctactccataggttactagatattgcaacctcataatgttgtaaagaacaaatgaatgaatatttactttataaagcattcagaacgatgtttgttatacagtaagtgctgtaattagtgttggttccataatttaaattagaataagagaaactcgggagactggccaaaattatgctgttactctttgtgcttacccatgtttgtaaagccaaacttggaatcagtacatttagggaagtcacattttattagaatgcttaggacctcaaaactcacctattttaaaactcacatatccaaagtgcttcctgacaaaggatactggatatttctctttaggagcaaaagtggtgccaccatgtggcaataacataaatatagctgccaatccatttagcttggcaaggcttatatgagcacattacatgaatttttaaaatgttttaacgttcaatttttttctaaattgtatgtacaaagtataactttattatttttaattcagcattttaaaattcccataatttcagttctcataaaacaagagtggcattttctttgaaaaaacagtaatgtaatttgcctgtgatttgaatttggcaaaataaacaaataatgcccttataacactgattttcaaactgagttccatggagcctgcattccctgggggaaaggaatagcggaggaagtgagtggatagaaccttggttcctcctctccgtcttttctaaaacatttccacttttgctggttttatatgttggaactgttcgtaagattttatttgaagaaaataagaaaatatccagccgtttaaagaaatgtttttcttttctaaaagccagtgcagtcctatattaggagtttcagtggggctttaaaactttattttattttttattttttatttttttttttggtaataaagatttactcagaactagaaaacagctaaattctggagaagaggtaagatgcattggttgaaaccctattcctgttatgcaggactgaaaagattagagcagagaaaaggcaaagacatggtctgaatcgcagaagaaaagaaggaaggtatatcacacatggcatttcagctttgtttctcctacttttcccgcatattttcatgtatgttgttgtcttaaacatattaagcattgaggctttcagaaaatattcaactgttttgtgctggctaaaggtaattgtttcctggtggcaggaggcatgaaccaatgaaacttttttttttttttctgtcaaaatagcacataatgatgtactttttgtaagcaagaattcctgatagaagagtgggaacacatttttgaaaaagtttatttgctgagtaatatgtttagaaagaatgttgttagagaaggatatttgctaagaaaaatcatttattcaactaatatttattaaacttacagtataagctacataatatactaggttccggagttataagggaatcccttgcctcaaatattagggtttcataatgagagggaagttttgttagtcatttgaaatagctatttgaaatagtcaaatttgaaatttgactattttgtcatattcataaatatgtcatattcacaaatatgactatttgtcatattcaaatatgacaaatagctatttcaaatgactaacaaaacttccctctcattatgaaaccctatatttgaggcagaggatttccttataactccaagtatttgtctgtgacctagaagaatatataagttgtagaaaaaaatacgggaaaggggacggtttgcaccatcttcctcgtagttcctttagaagtgaatttactttagatcccagaggaagagtattagatctggccacagaagtaactcttttatattattacctatattttctattttaaaacattamaattttgaatcttctcaagatttcatttttaggtacatttatatcaaattgaattttaatctcaaattacaaaataatatggattacaaactaatatataggttcttagcttctattaccttggagtcccataaattggcttgattttgtttccgtagtgcaaggagctgaataaagcttttactcagttcttaaatagtaaagaactagcaaacattgcgatactttagaactaagtggccattacagattagttagcagttcatgtttgtgttatggtttgttatgactgcttaattcaaaagcatatttgcagacagggagtttggattaagtaaatcaaaatagtaaaggctttgattaagaagttagcttgctttaacttaaatgttgatatttcaaggcctactgatattttagtcatttgcggttatttttgtttcctgttcagacccctgggaaataagagaatagtaaatcaaagcccaggttgctttttgcatttttttccttttcatttatgccatgtagtagttgactttaagaaactaaagacatggataacttgaacagaatcactgtgagggagaattgtatttctggattaatcaatttaaataattcttgttataaaatgattcttttcatgtttgataatttagtaattctttttattccacgataatgttatcgtaactagtggaaaagcagctaaaaatatctgcattactaaagtccaatttgggcagtattgttatcaaactgaggctatgttgtttgtgtctagggatcgctagggcgttgcttcatcagccagaaacctctgtgacaggtggtgccttctgcctgagtattgctagtgcccgtttctttccacccactcggctcaacaggctgcactcggctcgtgctgccagcccagaacccacacctgccaagtacgagcaaggcgtggagcggtgaggggtgtgtgtgtgattgagtgcagggtctagccactgcacacagctgggcacactggctgctgtggtggggcaggcagctccaggcaacaacacaggtgccagctccatgtgaggaggctgaggctggagcacatgtactgcacgcggcttctgctatgggcatccgtgtctggatgaggggaacatggtggcacccagaagcttggagatgcctggaaccactgaaccccaaagagagtgtcacagccccctggctcagggagcccctgggcctgggctccccaaagggccacagctcttctccccttctcatcgcccacaacatggcaagcgggagggtgtgtttcagccctgttcgtgttaacagctcttttagtcccaccatttgatgtgtcccgagttcttgtttcatacccaggaagaatgaggtatgcggacagctggaggctgagcaaagcgaagaggagcttcactgaytggcagaacagttctcaagagacccaaagtgggcagctcctttctgcaagcaggtcatcctgacgagtgtccagctctcagtggagaggagacccacagtggttagctcctttctccaggcaggtcatcccaacacgtgtccagctttcagtggagaggagacccacagtgggtagctccttcccccagtcagtagtccagacatctgtgcagccctcagtggagaggtgacctagaacgggtagcttctatcggcaagcaggtcgtcccatcctctgcctcagtctggctgagtccagggtcgttatgcgcttcagaggaggggaagtatgtgctaattggtccatggacggccatgggtgggcctggataaagcaccataagttctcactctggtccacggaactgacagcctggcccccaggattttggctgtccctggcttgaaggtggggcttcaccaggtaccctcccctttctgcccaggagcttgtctgcctcctgccgccatcagtcatgttgttcacggttcccaggctgttgccgaagggcgcctgcaggcccctgttgagctgccctcaatctcccactcatgctctttggtgcccaagtccaaaggaggccaagacgacagggggctggcgtgtcagtgctgccctgagcatgcacatacccagccgggttgcgacagtgcctgggcttggcctgaactttgcttcaaaatcagagcgagtgctgggagcatggagaggccaggcagcgacagcaggcacttccaagcctgtggggagcagaggacctaccaggtccccgactktgcgcagggatgcctgggtccatagctgcagctgcaccccggagggtggggcttctgcccctcaactcgaaagcgggtgaggctcccgcctgttcccagctcctgcgggctccatggagtgggcagcccccgcccccactgcagctggtgtcatggcagcagcccttctggacaggccagccactgccatcacatgttttcccattttctatttttggtgatagcaaattcaaacttcttaatttacttttcctgaaaaaagttgcctttcaagactacacattttaatgaagagccttcagtaataagcatttcagcatgtctcaaaaaagattcaactgttggttattttagctaaaatgtcaaggaattttgattaactttaaaaggatttaccttttatatttacatttattaatttaatttttatctttaaaatggaagatttgaaaaaaaatcttagcttagcttgcagcttaccagttctggtgtaattttcagtaatataacatggagtattcaatcatgaattagccattattatttaaataattcacggtgtgacctatactgggttatccstactgaagcaaacagcatgaatgggtaagttttattttcctcagtgttcacttactccatgttgtcacgtgtcagcacattgaattttaagagatacagtggagtctaggaaatgcaaaatgacaccttgggtggaaaaacttttcagattgttttcaaatacttacgcagtgttgccagaaatgtgttaacttagaaatttaactagtaaaacagcatatatttgtaattcaaacagtcaaaaagcccagtaagtaattgctttaggattttaatcgggtatgtgtgtatgtgaacatatacatgcagatgtgcacatgtgttactaattttattcccataatcttgtgactattattcattcattcattcattcacaccacacatgcactgaggccttactatgttttcatgttgtactaagcactgaaaacatagtctctgccctcatgaaatttggaatagtggtaaagatagacaaatgaatgttatgaaaagaactgagaaatttaatgggaaaattaaataaaactcagaaaaacatctatattaaatcatgttttagctaagatatgaaggataggactaatctagagaaatgtgttggtattgggggaaaggttttaggaagagagaacacatatggaaaatctctgagaccctggagtgcataacatgtttaaggaactgaaaaatcagtgtggcttgagtgagtggaggacaggtattattgaggctggraatatacagagaaagcacactatggagaaacaggccagccatgttagagacggaggctccactgatgagtgttagccaggaacgtaacagaagtgctttaataaaacaggcagcagtggcagagagaccttgatggcttcaaaaactatttaggagtaggggccagtcgggctgactcatccctgtaatcccakcactttgggaggcagaggtgggaggatcacttgaggtcaggagttcaaawccagcttggcaaatgtagtaaaaccccatctccactaaaaatacaaaaattagccaggcatgctggtgcacacctgtagtcccagctactcgggaggctgatgcaggagaatgacttaaacccggcaggcagaggttgcagtgagccgagatcgcgccactgcactccagctgtcagagtgagacttcatgtcaaaaaaaaaaaaaaaaatcaggagtaggaaagataatttctatcaattagataataaaagagagaggagtcactatcacttctctgtttctcttrtgtctgcaatgataaaaaaaaatacagggatactggagaaaagaacagtaagagacagctaaagagaatcccagtagtacctgtacatatgagttgcacatttggtggaatagatgtttaagctggagatagaattgtcaacatagaggaagcaaagccctaggaatggaagggatctgcagtgagagagaaaaagagagagagagagagactcttttccattagtttcccattccatgacatacttccaccagacataaactgttccttcatgcctttattctactttaaatcatttgatgtcagtatgtcaattagcattcacagaataagataagggaaactttttttagtctcatttacatctcacaactaaataggccagattttgtaagggaataaactcagaggctgctgaggggttgaataacttgtctctctgacagtggtggccatggcttctgccacactgcttgttttgtgaaacaaccaagtctcctgcctacctttctgacctttcattccacctgtgccttgtaragtccaatcacaagtcatttgcagtttcctttttcttttcctgttcctgtgtacatgctcttctgctctgagttcacgtctctgtgtttttggtggcatagggagggttaggcaaacatgctttctttgtgaagccttttctgactcgacctgaaataatcagtggtttctctttttcaaaatttctctgtaacaaataacataggacattatttttcagttggatgcctgtctcatgcctttctcctattctcagaacctgattaccttgccctaccctgcccaaccccattttatatgtactttatgtgagctttggcaagcagggaccacattatactttttatttttatttccattgtatttagcagagtaatagcatatgctcaaaaaatgtttgttgaattaagttgataaagaaggaagacatgggcaagaaacatagtgtaaaaggcaggaaggaaactatgtgttaagagacagtggtttagccccccaaaaaggtagcaagagataagtctagagaggtgtcggtgaaactcgtctgtggtaaaatttgttggggcaaacagtatttatgaaacccaatccataatacataacatggatagaaagaatgagactgaaaaaaaggacttgttaaaaaaaatttaaaaaccttggcagctgtcccctctccccaaaacacacacatcctccccactcacgcccccacttctgcctccacctccatctctatctccatccccaccagcttagcttgacttttgggagctagaatcccaaagatccctttcccagagtgctctgctccagacctagcagctgcagggaactgtgggtattttatgattttggagccagagaaacaagatggtgagtgacctccacaaactgagggaaaatgtttgggctttggctgggcttcttctgagcagtagtgcagccctaattcattcttctcttttccacacaatgacatcgaaggtgttttggcctgctattcgtaacgaccccttcacacatgttagcctgcggaaagaagctctactgagcagaggcgatcagctttccccaggtggattttgggccatgttacccaaagaaaacttctgttttctgttttgtgtcactcttctcagtagctttgctctgtaggccagccctggaggccccttctctgcagagggttagaggcctgtccccagtccctcatcatcatatttcaggatggctggaagcagtggttccaaggccaaattcatcatcagtgggaaatacaaactggtatggaagatcacatctggcttttttggggacatttatcaggcaaagaacataaccaatagtaaagaagtggcgctagcatccttgaattctggaaagctaggtatttctcattgcagtcccagagaaaactttttagattcttcagggcgggttagtatttcaacatgagatggtatgattagagcaaagactgcaatgtgctactcttggatcttcagccctcaagacctcttcattttcttttggagaaggctcccagtgaaaaccgtagttaggttagcagaccagatgactggtagaattgcatatgtgcatgcaaagaatttgagtcacagtttaaaccagataacttcctaatcagtattgagtattgctataggaagttattccttattgattttgatttgctgaaaaagtacagaaacaataggataaggcagcacatatcatagaggagatagtaatctctagcaccacttgctaagttagcatcagtgcacatcttggtattgatcagagttttagagatgacatgttatcatcatgatacatgtaaatgtaatttaatagaaccagcctgccatggcaaagattaaagtctgcaacaaagaacagaaaaatgaaaatgttaatgagagaatgataaaatgaaaaggagttgatggaaggtatctactcctgttgaaattttgtataaggggttttctgcagaatttgcagtaaactattgttatggatcacacattaaggaagccttgagacagctattccacaatattttctggaccctgaactgctgatattaaatacatatttggttgaatattgttaaagcagaaaacagtacagaaggcagcctcttcccatggagttagcatgcccaaactctcacaggtttccatgcatgaagggaggaacagaagaagcagaatagataatcagagtaacatttgtatatcgccaaatccagaatttttagttcatatgtcgcattgccagtgttgtgaacaaccatttcccaggtaaaaataacgtaggaataaaatggctctgggcagcattgctgatataaccaagttgtggcctctgtaattatgtatattaactgaagttgttaaacatgctttcaatttttatagcacctttttcagtggaaaacttaactaaataattggcatataccaatttgtgttgagagtttttccatgccbgtgtgtgtgtgtgtgtatgtgtgtgtgtgaaaacctattattttgaactctactgctttgagaagggccatatggttgtatatgcacaaaattgcgcattcttaaagttttttcatacgtaaggcttgcaagttgtttacttaaaacattaaaatggttggcatcttgcttaaggcagctgataaagtagcaacgaaagagtccggtttttgaacatatgaaaattctgtttgttatactatgaatagcagcatctaaagtgaagaagtaagaaatactctgtggtaactagattatccttagtactctgaatgaactctttaacgacccttgaattaaaaaatatttgttacagaaattgaaagctaaacgtgaatgttcatgttcatgctcaaataaatgtaattattatgaacacctacatgatttgggattttggttttattttgaaatgagagctctttcatttacaagttcactaaaaactcaaatgtttcttgaaaatcacaggagcttatraacattaaaaagaaggartaactattgaacaaataagacagacactgtcaagaacgggcaggactttgcaaggtgataattaagactagttaatatttatgtggaaaagttctgrctgggcatttggaacataataatatgaacaayataatataataaatatagcatacatttgcatttatttgcaacctcagacaagcaagatgagtccaaataaagctagcttcatcrtagtcctttcttacatgtgtcacaaggtcttgagatcagtttaaaaaacatgttttatttacaactaatgtgaatactaatatttgctgtcatcagattccttcgaaaataacatatgcatcactggccacctgttctaagtaatttttgaggaatttgcatgttcccagacaaggaatgttgtgaacagagatgattctatttatccactgttaaaaatggcagttaatttttccttgtaagttgatttctaattatgataatatggcagctatggacaatgccctttcttaaacatactgggatgtaaaagtgaccataacttgttgaaactcagtcctggtattgtgttactattatttctcctggggaggcttattagcctgtcacaaaagatgtaagaaaaatccaacattccttttggaatatgatgagcctttgtcacccayaatgcaattaatgttaaaaatagaaagaatggctatgatatgattatgattaggcagagatgagctattgtccaagtaacagraactaatctagcaggccaaagatgacctacacagaaccatcagtgtgctgattgccatttctctctgagtttgatgaaatattcatgcctttgctctcctctctgcaagcactattgatttcttgtataaacgctgctatatttagtctagacaaatggaatgtggattgctgctgaataaattggatgaaagactgggatcttgcctgccactttctctcagtcttgggcaattatttataatcaagagcagtttttgtaagttgagggtgatttttcacaatttagtgattagtctctgaacaaaggcaagcagttagacgcaatcatttctgttgggatagcaggttaagaagtcaaattaccctttgaggtttacaataactgtttcagagacttgtaggactttttttsttatctttttaaaaaagcttttttagaggtttgatgtttgtagttcatggataacaagaatgccagcaagaagagactccagggtctcttgaatttttacattttgtctttatagggttaagttctgacctttgttttttgagatttccatgtaaaagctgaaggctatagcttggcctttttaatgtaaaaatgaaatatatcattaactgccattgcttttggttggaattatgccaagtcttttagttaatattcaaaatctcatgttactccagakccttgactaaaagttctacattgggtgctacaattaagagatcttacaggccatcattctaatttgcatctgaacttgtcatgattaatttctttcctttcacaaatatcatctttgagaagtcaatgtccaccaaactatagttcatttataaattattttcccattttcattaaagtgacacataaagtaccatcaatgcaaacttctggtcaatccatggcaaaataaccaatgtragcaacccaagattgatatcagtctgcatgcacaggcacaggcacatgcacatggacattcaactcagatgaccagcaaggacatttaagtatatgaagccttaacatctgtagacaggatttctgttagcctttttttactcactgaaaataactcttaaattcacatggaaaattaactttgtagttcccaaactggaatctgcaaatttaagttagttacttatagtaatagagcattagatgcaatttggaaaaatacagaaaagtaaagggagaatcattcatatttccgtctaaaatacagccatcttctgttctctacatcaccagtcattgctattagaatttaaaaactaatatgatttaaaaaccgtggtagaatatgtgctcgataagggctggaatttttgtctttctttaaaataccaaaccccaacatctagaatgaagcctgggactttaagaggcttgataaatctattttgactacattgcttatatatatatatattttttaaatggttatcatagtgtaaatatcacttttttcacttaatgtgacaacttttttaatgttcccacaaacattatttttaatgaatgcgtagcttttctaccaaatggatgcgacatattttgctgagacatttccttgtagttggtgatttcaataacaatactagaactctagtaaataatacracattgaactgtttttttccctattcagtattrtctcctggagatataatcctagagttggcaaacctgaatcaaatggtagaaatatgtaacacttcttgatacgtattaccaaattggttttgcataagttttgtaccaattgacagctccacttgccataaataatcgtctctttggtcatacgcttagcctatacaatggggcattgtacacatatatgtatacacgtgggtcatatatatgataataatcaatgatgctctattttgattcataatttgcaattctttactagtgaaggtgattttcagttgttgcattcttttatttgttttgatctagatgttttagtatttttattttctaatgtttagtagaaattgtgtgccattttatttttatatttgtttctaatatgtttgttttgttagctacttactattgatggtttattttaatatataagaaatttccatttcatataataaaaaagcaaaaacaaacatctgttaagggctgtgctacatgctattagtacttactgttactatctccaagttacggatgagggaacagaggcctagggaaatkaataacatcttcaatgttacacacatgaaagagtcaaataagcatttagattatagaacagaatttgaaaactggtacatgtaaagactgaagcattttgtttggttcctggagtatttaaagcttttgaagagcctggtgctgtgactcatgcctataatctcagaacttgggagctcaggcaggaggatcacttgaggtcaggaattcaagaccagccttcgcgacatagcaagataataccccagctcccactgccctgaccccagctataaaaaaaaaaaaaagaaagaaaaatttagctggtcatggtgatatgcacctaaagtcccagatacttgggaggctgaggcagaaggatcccttgagccaggaagttctagactgcagtgagctatgattgcaccactgcactacagcctggacgaaaaagtgagccctccagcagcctaaaaaatctttcagtttaattttcagttaacagttatttctgtctacactggatctgtattttctttttctcccacaactcccacaaatagttggttttatctgagtagtgactggcctcttttgaaaagccatgcaatccagtttgccacagtttcccctccaaaattcctgttgtctttagcttaaccttttacactgaactacagaattttcccgattcttgtgggtaagggtcatactcaaaatatttaacaaccagtttggcatggatgctggtcattcaaaatgtcagaatggacaccaacaataaataaatggtacacctggatatcctgtctgtgagttttcctgcttaaactattcctttagaaagcagcattcttttttttttttttttttttgagacagtctcgctctgtcacccaggctggagtgcagtagcgagatctcggctcactgcaagctccgcctcccaggttcacgccattctcctgcctcagctgggactacaggcacccgccaccacacccggstaattttttgtatttttagtagagaaggggtttcaccgtgttggccaggatggtctcgatctcctgacctcgtgatctgcctgccttggcctcccaaagtgctgtgattacaggcgtgagccaccgcgccgggccctgaaagcagcattcttatctactaagagtttttgctaagaattttatatctattatctaatttaatttgtataaatttaaatattatcatctgtagttattctcagatcatcaaatcttttttactccagtggtttgattaaatacttgttttaagtttcctcatactttttccaccttgtttattttaggaatgaggtagctgagatacagattattaccaattcaacatcaggacttagaaacttggctactttcactccttgttgtttggatctggcaccattgctgtggttaattaccattttccacattttagcatgcagttgtctattctgtctttggtacatccaatagtgctgcaaatacgttatattacaacctttactttgtaaagttgaagatatcttctgacgctgattacaaaggaagatgttcttaagtgtacaaatgtagtcatggtggaagttctctcttagggcatcttttcctcaacataattccattttttttttgtcctcgttgacttgatttttgttagtggttcagtagaataagttttatgaatgactgataccagtaaacaattgaagtcacctgtttgtaaaaggaaattgtggargattcatggcagagtgcaaattgctgaatgaaaattagcctatgssccatttatcaaaactaatgtacaaatgactttatatcatcattgtaaagaaatggctagagtcattggcataaaatttgtygtacagggtcttatactttttatttgtttccaaatcaatgtgctaatttccaatcttctattaccctcccccaccccatttccctttttttctggttctttagtggatgtgaagtcagaagttcctgtgggcctggagcccatctcacctttagacctaaggacagacctcaggatgatgatgcccgtggtggaccctgttgtccgtgagaagcaattgcagcaggaattacttcttatccagcagcagcaacaaatccagaagcagcttctgatagcagagtttcagaaacagcatgagaacttgacacggcagcaccaggctcagcttcaggagcatatcaaggtagcaaatgcttctttgtctgtgaccttactcaggagtctgcaccgtggtgggcatgaacagtgcccatgggaacactttgcgggtagattcactgtgattaagacatggatatatggcttgaagggaattgtgattttactagtgaaaactttgggtaagtacctgttaaaaacctgttttgcttctcagagggaccttctttatcctttagcacatagaatcaatagcagggaatagtaacttcctatcctaattttagattctctcctacgtgattttgttcatttgcccyatctgctctccaccaagaagaagcatgagcctagaagacccatttyatatttcatttctgaagagtctacatgtactatttgtgagaaaggrtaaattagtcaccttatatgaagagagctgtttttaaaaaacaaacatggtgtataagtagatgttctgagtatgtccgactcttccttatagaaaagatctcataatgtacacattcaaaataatagtataataaaaagcttaagggagttataaatggagaaactggtgcaaatgtttttatagactgtagataagaatttattgaaagtatttgggagtagttgacaatttgagactaaagttgtttaaattattttagcacaaatatatccatattccagaatttttaataataacttattttattatctaataatattagatgtgtctgtttttttaaattttgtatcttcagagataaatattactttagctttatttgtaaaacatcttgcaacttcttgacaaagacagttgaaacaaggctatttaatttgaatttattgtgacagaaaagcagcaaagatttacaacaaaaattttatttttatatctaactttcaaagatgacaaacacttgctaatttgtgaatgtaataaattatgttatctcatactttattgttttgtattataggaactttattacttgcatatcaagtacaagcacattgatagagggttgatacagataactgatgttactagtatgtaattttaccacattaatatgacagtttctaaggaagtaaaaatgctrtcttcttctctatattacttggtttacaagatgtttyttaatcctaaaagaactttattatcgtatattcctaaaaaggctctttgacaagtgatataaaatatatttatttcttttagtagtgaactttccaaaaagaactcttgtatattattgatgtacaaaataccttaaagtgagagtattttcttttgtcccaaatggaatcagtagctcatggctacattttgaagtatgggtagcctttctttagtttttagacttatttttgaatgaatactgaagctttatttaaatttgacctttgaaacaataatagaaacattgatatctagatctgtttctttccttccagcatgttaagatggcaaagagaaatgagtaaaaygtacatttttcaccatactttaagatgtaagggactgtgtagttcattttgctgctttaagtgagacatgtttccctaaatacagggcaatactgataagttactgctttagatacttcttttcatttatattgctgcctttgatagctataaarttaatataaattgtttagaaagaaatttattgcttaattttactcaaaaggtaatagtagcaagtagataattaattgttcatttggcacaagcaaaacaatagtgttggtttattgacatctggaaaatattggaaaagtggctcctgtgagaaaaaagaattatgagatagctaaaaggaaaatttagcttttaaaatgattttccaaaataataatttgttttcttagaaaccaaagacataattaatattactttttcagattaggaagttttttgatttttagaatttttattttgttttgtcttgtattttttatggataaagctaaaagttgatgcttttcattaagattttatttttatgagaaagatgcattacatgatgctttatttatattagctttttgaatcgttagcttctgtaataatcaacatttgttgagttagatgctgttattccatttttccacctagtgaactgaggtagagaaaaataatgatacctttccaaggctacatagccaataaattgttgctccaagatttacagtcttgccctgtctgcctccaaagctcttaagttgccctgcctctctcatgggccagaacatctagcaatagagggctaaagttttatttctttctattgttttaaacctcattcatgcaatctttgataatgaatagtagtggtaattaaattrtgtgcttttctagattcctatgaaagattaaagttcaaatacattggggctttgggtgaagcaccaaattaatttgaccaacccaagtatctatatagaatttaacagtaaggcagaatttaagcattccttctgctaccatggaatattatttcattacaatggaataataacacccattaagggagtgtattgaagccaaaacaccaaagattttaatatgaagagtaaccagaaatgcttctaactatgtccttctgggagtaataaggctattatggttgatatacagagttagcttcctgttgctccagagtgactctgatgccattccatataatagctttttatttttgttctattactttttggtgtaaaatcaagagttttaggcacctaatgtaaaaaacaaaatttactaatttcattagtattgaaagttacaaacacatgttgggtatcccttatctgaaatgcccgggaccagaaatatatcagattttggatttttttttctggattttggaatatttacatatctgtacataatgagagtcttggagatgggactcaagtcaaaaatataaaattcatttatatttcatatacaccttatacacatagcctgaaggtaattttatacaatatttccaatagttttgtgcttcaaacaaagtttgggtacattgaaccatcagaaaggaaaggtgtcattgtctcagccacccatgtggacaatctctggttgtttggcatcactgttgttgctgagtctgaatgtgaggaacatgccattggcatgtcttgcccacacacacaccattttgttatcttttgtgggtgtgcttatgtgggggaatctgggcgtgtgtgaaaaaaatatattgcagctgaaagggggctggaagggtcttttttcccatggtgaagctgmctaaactttgtgctgtgtgcctgcattttgactggaactcatcacatgaggtcaggtatggaattytccacttgtggcatcatgtcagtgctcaaactatttcagatgctggagcatttaggattttggattttcagattagggatgcccaacctataataataataattaaaatcagtagggttcaaacttaaaaactaaattttatgtacgttatgaatatgcggctgaagagagatattctctctcttacatatgaggaagtatggctccgagtagtttagtaacttgtccggatttcatatctactaatgtcagaacctaaggagaactcaaggtctttagttactcctcagtgygcacatttactatagttcatagatatatatttctcagtctgagtggaaatagacatctcaagatggctattaaaaaagaatgcttcaggctgggcaaggtggctcacacccgtaatcccggcagttagagaggccaaggttggagcatcacttgaggccaggagtttgagactagcctggggaacatggcaagactttgtctccactaaaaatgataattttaaaaaattagccaggagtggttgtatatgcctgtaatcctagcaacttaagaggctaaggtgggagtatcgcttgagcccaggagattgaggctgcagtgagctataatggtgccactgcaatccagcctgggcaacagagtgagaccctgtctcaagaataaaaataaaaataaaaaagagtgcaagaatgcatcatattcatgtcattcattgtttgagagtgaattcaagggattcagaaagctaaacaatagtgcattaaaatgaagttttgtggaagtggtttcttcttgaccagtgtctttaatctaaaagcttttatgtgctgaatgaaagaataaagcttctgctattttgatattttgagagactatatgtatataatatattctacatattatgaatatatacattgcattagtctattgagaacttgctctgtaagattttgaaatttttagcatttgtttacttcaggtaaacttcccccaaattaatttaatatctcaccattctgtatttgcgttgattatttttacaccattttttaggctaagaatggaagatttcagttgttcatttataaygtgagggactttgtaaaataggcttctgggcagtccctaccttttcctgtttgtatgttcaaagaaaagtcattaagggaactaaagatttaattaaaggaaatgggaagacctgagtgaatttaacagttagttttgawagggatgcacagataatggagctacctaaaacttgcctgttgatgacgttaagaccttcactgcattagttgcttgtccttagatttcaatgatttacagaaaaagtgggtacaaatatgaactaaatacaaacaagttccaaaagctcataacatttcagttttggtcagtgatgactatgaarcctaaagaaattgcacactctcatgtctttctcttctcgcaagttgcaacaggaacttctagccataaaacagcaacaagaactcctagaaaaggagcagaaactggagcagcagaggcaagaacaggaagtagagaggcatcgcagagaacagcagcttcctcctctcagaggcaaagatagaggacgagaaagtaagaggcaccagggtaaacgatggactctctttcctcatcrttagctgatcattattcagaacaaagcctgataaagagtgcggttagactcgtcamaattatctgtgtttaattaaaagcatagattacagacccaactgtaaagttttgacatttacataccagctcacatcattgagtstgcagagcgtctcaagaagcaaacgtaacattatctggcaaaggtgctgatttctgttgttttgaaccttaaaaataatgtaattctaaagcagtctaatatatgccatcttgtttaataatcagcttgtatccacatctcctgactatgccttccttactcctggccaagtaataattgctctctaagtaaagccttgcctccatttagttttggcatactcaaacttkgagaagatttaagacataacacatgcaaaagaactatccacaagagggagacagatccaaataattcccctgtattaggtcagttcaaaatcaggtcgtagcaaagtttaaaatttgatgacttgaactggaattgtcagcaatatttatttgtttaatgctcaaagggtttttttaaaaactaaggttttcaaactagcaactcagaaaagattattttaatgtgtttaagggatttaatatggatctaatccctcaagataacttgattattaaaatacagtgttttgttcctctgcagtawtttttaaacttaaaaaagttgattttgggaattccctctttgcaaaagtaattaaagaaatagctgaaagtcttttgaaaatttgcaatttaagtagtatttataaagcattactgtactattttctaaagcatatttggactgtggtttcttcttttaataggaaaactttatgtgctgtgaccagcgattttacttcttaatctttgtcaaatattctagaggcatgagaggacaaaactcaccatcaacatctgtttctgtgtgtgtadtgtgtgtgtgtgtgtgtgtgtgtgtgtgtgtatttcaggggcagtggcaagtacagaagtaaagcagaagcttcaagagttcctaytgagtaaatcagcaacgaaagacactccaactaatggaaaaaatcattccgtgagccgccatcccaagctctggtacacgtatgttcagtgtttggctgttttcattcctggggtaaagaacacaggttctgtatttagccgacctgggtacacatccttagcctgccatttctcagctgtctggctgtgrgcaagttccttcagttctctaaggatcagtttccttctccataaaaagaggaaaataatagtgcatgccctctagggttgctggcacggtcctataaaataacatggtaaggtacataacagagagaagtgctaaataaatggtagcatttatcaacttgagggcaaggaagtatatatgttctttgatgaatgaataactgacaaatgtgaggtgggcaaagaaatttgtattttgcatttttccattctcaactggtgcatttggtatctatatagtartttcaaaaggtttagcagattrtgattttattacacttgacttggtgtaagatggaggtcagagctattttcaaaaatctagtagaattttgtctcaaatgaagaaaaaaggaaggaagaaaggaagataagggagggtagggaagggaagttgagaggttgctaaataaataactctaagtcttcagtgaatagtttacccctgcccacctcacttcatttcttcccagacagcaaaataatagcttggctcctgacacacaacctgacaacataatacactgtggtattgtggtttttatagaactgtatttctgtaagtccaatacacaaatatttcaataaaatatagaggatgtggtgattttaaaactcagggcaaagaactgataggcaaatcatatatggataataaactaatagataatagtttcatttctttcttagaagtgtttgccaaatgaccatatawttttacacttatatatttttcaatccctcacaccattaaagataggaatagtacttgattactctgttatattaatattgtaagcagcctgggagttctatttaaagagttaatgtacttataaggctattttataggtatccgcccttctctgcatcccaaaacaggtaacagacagataccataatgttttataaatactttttaatgattttcataatttctgtcatgtatatcagttgacatgaaaaacaaatctctgaaaaacaatttcaaatattcaatcaatatcacgaatgatttaaaaagaaacacgattttgttacctaaaactacacacataatttatagctaattcataattcaaaattaaagtctgttctaagaaaagataatagcattaaatgagaaacagctacatgcaaagaatttgtcggttaaagttcattagctgttctcttaggtaatattaagcatagctctcacatgttacttagcagtatttaccttgtttttatgaaattgaacttcagtagagtccaactgcagataaccacaaacgattaatttatagaatctgaatttaatgccatttttgccagttatagctagaagaaatatccttaaaccaataaagtcttaagaatatatgatttaaataaataatactggtagaacaatcattgtgatggtgatactatgtcctgttcattgttttcattacatatgtaattatagatatttatatctactagatagtcaatattcagtcctataaactattctccagcagcacagttgcatctcttagattgtattcacccaggaaaaagaaaacatttaaaaaaattggtttcatattaaagaatgtgatccccattctttactactgaaactgccccrgaagtcaggagatgggagtccgttggcacaatcctgtcttttcagtaaaaaaggctactctcatgtactcacatgtactatctagcaattttttaaaatgaagtccttgcgtatgtttactattaccttgattgttttatactgttgactagaaaggattgagatgatgacttttcccctagggtggctcttaagagaacataggcagtaatctcaaattgtcaaaagctcagactcttggtaaattattttagtgaagcaaactttctatgtgactgtatgaccaaacacatgctggacatccttaggatccctgcatcattccatagcatactgctacagtgaacttggttatgtgaggctatggtttgtatacactaaggagaaagagcataaacatagctgaggcacgtgtacagcgtgtgcagctgattattgctgaccaayatgcagtaaaaactaccaagtaaatagtgwaacttccttgtcttttctagggctgcccaccacacatcattggatcaaagctctccaccccttagtggaacatctccatcctacaagtacacattaccaggagcacaagatgcaaaggatgatttcccccttcgaaaaactggtaagttggtttaacaggaactctgtttgctcytctgtaamacacctgtaagtttcattttgccacacctctagaagaaagtcaaaggatttgagtcgtagataatatacctccccamccctgcccccagcataagcaaacaatgcacacacatrccctacttatttctgcatcagttgattcatgacataatcaaaatatctctttttcagtttaaaagtttatcatatttgaactttagccaaattrttttcttactaggaataaataaaaataaaaatttcgtatctcggaaaatctaactcttctccattagatagggcctctgtaatatctttcattgtcctgtttttctgctgtacctcaaccatttaccacaaaaacgagaataataaagtttaatttttccaataaatattttacaaaccttaaattttaattgtttttgtggtgaaagcaggtaaggccaaagctaccttctgagtaagtgactagcctaatatctcatggattataatagaactcagagtgaaattatatctgataatctcatgaagttaggggaaatagcgcaattaagcttttatttagaatttagtaaacagttctgtggctctaaggattgtatttgctgttccatcttcatctcctttctgagcattctgatatgtatatatttaatgtcttatatgcttttactgctataataaatgtttaactagatatacatataaatagcatttgtgtacattctattctaaatctcaacgttgtttgccaaatatagttctttagagacagtagtaaatttaaaaatgtttatctccacaactgatctgaaaagatattcatgtargatagcttggtctattgtatttgactcagatctacttgaagaagtatagatytatttrttttatatatgaaatctgcagagtgaaaatgatttcaaataattatattcattttcccaagcaattttgagaaattaaaatgaatatagattgtaaaaacacatgccgaagctattttttgtcatataatttacctgtggcataatgaagattttaaaataaaatcarttatgaataagaatttattattcgccatctagcatatattgaaggcactaggaaaggatgtttaactattgcaaaacaacctgtggcyttttaatttaaatrgcccamatatttttgcatttctactaaaagatgataagtattataaaataccttaatagaaggctaygcaaaggcaaggataattgagttttrtgtattgcatcagaattccaccctattatctgcaaatcagagtgtcttataaataaacttttctaggatgaaagaaagcaaaatgtgagcctctatgttatttctaaaacatgagtatagtttatgaaaagtgatccataaaggacaggagttttagaatgtggggactttgatctgcaggcttgacatttatttgtgagtagcatgagtaggagctatttactgagattatgcagatactaccccaggtcttagggcagtgaatggcattcaagaatctaaggagttactaaaaggaaagaaaaatatggattccccttatggcaggaggttactgatgagtgatayagttacattcacagagaaagacttctatcctgctgagcacagagcctttgaatatatccttaccactgggagattgaaaactgactgcagaactgataactgactttgaaaagaagtggcatttgggaacattaagcacccagtgagaaaatctgatatttttaatacttaaggagaagtactaaaaacccatactttgtgtcccactgttgccatgcgaacagcttaaggtttttcctctgtgaagaataaataacaagctgttaatttattctcatagatttttttcaatccacaacacaatttaaaaagaaatccttctcaggatatatatgttacaarccctatttagatttgtacaaatatgcaagacattttctgtgccttattatgtgctatataataatagtgaaaaatccctggtcttttctagaggtattttttctgtatttgatcagtatttcatgtttcttccttttatgttgaaaatctgatatttatgaagtgtctggctgttratctgtaaaaccaaacattttcaagcatcgtagcaataaagttcttgaacagccattaatactttagtatctctatagaggtttyaaaatattccttaattcaattccaattgtctgtttaagaaaaataagatgtaattaaatacagatgctttctatactctatctaaaatacttagagatgcccttcattaattacaaaataggtggaacactcagcttttataaatataatccatttggtgtattyccaattccattatgagaaaatttagacatatatttgcactaaaagaataacactgaaatgttgtcaaataatttttacttcaatgtttattgtatttcrgtgactcaaaagtatttacaaacaaagcgaacaataaaattttaccataataaaacatatgtgatgattggggaaactgtttaagatagcttgtgtaaagctacatcatactaaatgaaatctggaagagtgtcattgatcatagagtgtaaacaccagcccagctactgtagagtgacgctttgttattagagccagattctaaacctctcttgtctgcttggatttcattgaactcaatcttagagttaaaagaagttgttaaatgagtgtatcctatcgtttgatctatgtatgatactattttagtttcttttaaatctacatcagcaatatgtattagcaagcaagatttacgagagtaaaactggaatcagagttagaaaagtcctaatgatcttacattgattgagatasccctaggatgtcccttaagcagtgagcacaatttgaaacctctcttgaccttttaggaccttccccagacagtgataacccgggaacagttaactacagaaacctcatttgcctgcagaaatctgacctttgtcacgcaaagtggacctttacttccttccccttaggagaatgatagttgctcctagaatttgggcattttagaaacatggaattatattaaaagttggctctaatcatgcccattccaattcacttttctttaaaatgtaagaatggagtgacttctcctcctttcacaacaacatcaaaggctttacataacttattttgaagtggaaaataacaattgtttttaatttttatatgcattgcccacacttaaagtagtacttccttctagaattatacattgtaattaattttgttctataacacaaggataggttgataggaaaatttggaatattttactaaacttatactttggctgaaaatagtatcattgctgtagtagatgactttattgtttttatatagtacactgctgaactgataataaactatgaagtagggaaaggaagttttggaaatagtacatatttcctggcactttggaaatggtacatgtttctcacagagattctacatatgtggtgattttgaactgaccttcaaaaccatttgattggattctgttccagtgagtgtgtgcatatgtttcataaaatattgtgataaaatttctagaagttttaccctccattatattattgaggttttacccaatgaactttgcctttctttgaatattacagtctttccatttaatacttctgaacaaagtgagttagctggctagattaacctcttaaagtgcacaagccatgtaaagcttggcttgggctgataagagacttttccagccccactgaaatatttattttaatggtcagcaacactagaataagactcaaagatggaaagagtccaaacataagtgaaggttttggaaggccagtatcattttccacactgagtaaactggaacgaaggcagagattagatatgtagctttataaattgccttttggtatagcagtcagcagttatgttctagtaccttgatgacctattcaagtcattataataaaaaacacaataattatttttaatagtttagaatatctcttcctctctctctccctctttctgtgtctttcagaatacacttgtgcatgtgtgaattgcatacatgaacattatacacatttctgcaaagatatcattaaagatggcttaggcttataacgatatttgctcaaaatcttattcaagattgacgaacactggagcatttttatatagcttagtactctatcttggttacattgtttygactaaacttgtcaaagtttatttttattgaartatacttcttttaatgaatcttatactagttttctcagaattgagaagtaatatggccattgtaattcaggctttgaatccacacataccacttggaaatttgggtcctcaatcttgagcgattaatttaacctctctaggccacgattccctcatctgtcaaatgaggataataattgcrcttggtttgcacagttatttttagaattcaattaaataatgcatgtaaagcacttaggatcatacctaggatttaaggagtgcttactcttgactgtatgcttgtataaggaaatgttatttatttctattatgccaaaactaaatctctttttgttgtagaaggtctttttaatgtcttacattcttctacctttattaatagaacaaccaaactaataaaaaggtgatcaatattttctttttaagctatgggcaactcacaaggctactgtcaaaatgagggtaaagttatttgttaattttgcatattctctggtatttcagagctcactatggtatccaaaagaagcagcaggctgcatgcctatagtcctagcgactcaggaggctgaggagggaggattgcttggcccaggaatttgagtccaacctggrtaacatagggagaccctgtctcttaacaaataaaataaaaarcggagcagcaggcttgtttttgttgttcatcgtaggaggaagtctgattgatgttctgtgctcactagggccagagttttaatttctgctgttaacttcatttttaaagtagcagactttaattttaagaaaagttttatatttacagaaaaatygagsagatattgttgagttcccatattgttgcctcctcctaacccctaggtttctgctttttaaatatcttgcatcaatgtggtacatttgttgcaattaaggaacaactattgatacattattgttaatgcagtccatagtttatattaaggtttactctgtgttgtaagattctatgagatttaacaaatgtgtcatatcatgtcatatatccaccattacagmatgatatagaatrgttttaccaccctaaaaatctcctgtgccccacctattcatcctccccccacccaacttttggtaaccactaatttttttattgtctctatagttttgccttctgcagaatgtcatagggctacgatatgtggccttttcaaactggcttcttgtatttggcagtatgcatttaagattcttccatgtattttggtagattgaagcttttttggttactgaataatattccattgtatggctgaaccactgtttatccatttaccttttgaaggacatttttgttgcttccaaattttggtgattatraataagctgctataagcattcatatgcagtctttgtgtggacatgttttcagctcaattgggtaaatacctaggagtacattaactggatcatgtggtaagacttgtttgttaaaaaaagaacaacaaacaacaaaaaactgtcaaactgtcttccaaagtggctgtactattttgcatgaccactagcaatataacagagttcctgttgctccacatacttgttagcactttgtattttaagtttttttttttttaattttagccattctaatacgtatgtagtggtttctcattgtggttttaatttgtaattccctaatgacaagtggtgccaagcatcttttcatatgtcatttgctatctctgtatcatctttggtggtgtctttttagatattttacattttttaaattggtttttttctcattgttgagatttaataattatttgtgtattttgggtacaaattctttwtttgctgtttgtcttacaaatatttttcctcaatcagtggtttatcttttaattcttgtatcattgtctttcacagaacagaagattctaattttattaaacatcaatatttcctttcatcgatcatgcttttagttttatatccaaaaattttttgccaaacccagcgttaactagattttctcctgttttcttctagaagttttacaatatttcatttagatctataattcgttttgagaaactttcaatgaaaagataaggtccttgtctagattcattgttttccatatcggtgtccaattttgctggcaacatttgttgaagagactatcatcctttctccaaagaattgccttagctcctttgtcaaagatatatttgtgtgggtttatttctgggctctctattctacttcactgatctacttgtctgttcttttgccgataccacactgtcttgattactgtaacttcatagtaattcttaaagttgggtactgtcagtcctcttaactcttcttccatattgtgttggctatcctgagtcttttgcctctgggtataaagtttagaatctgtttgtcaataaccaccaaataacttactggaattttgttttgttttgttttgttttgagacagggtctcactctgtctcccaggctgcagtgcagtggtgcaatctcctgggctcaagtgatcttcccgcctcagcctcctgagtagcttggcagcataggcacacaccaacatgcctggctaatttttgtatttttcgtagagatggagttttgctatgttgaccaagttacttactgggactttaactgggattatgctgaatctaaaggtcaagttgagaatagccatctgaacaatactgagtttttctatccatgaatacgaataattcttycatttagattttctttgatttctttcatcaaagttttctagtttttctcatttacatcctctacataatttgtttgatttatactttcctaatttttttggtattgatgtaaatgttactgtgttttaaatttcaaattcaaatggttcattgctggcatataggaaagcagytgacttttgtatattaactttctatcttgccaattggtataacagcttattcattgccagagttgtttgttgtcattggttctttgggattttctgcatagacgatgtgatttgtggacaaaaacgttactttatttcttcattcccaatctgtatgccttttttttttctttttcatgtcttattgcactagctaggacattcagaatgatgttgagatgtcgagcaggagaagtaaaaggggacatcctcaccttgttcccaatgtcaggggaaagcattttgtttctcaccatcaagtgtgatattagctgtagattttgtgtttgtgttgtcaaattcaggagttccctctattcctaattttctgagagtcctcacaaattaatgttgggttttgtcaagtctcttttctgtatcaactgatataatcgtacgattttttaaaaagccatttgatgtgatggtttacattagccaattttcaaatagtgaaccaacctcatataccaggaaatcctacttgcttgtgttatacaacactttttgtacatcattggatttgatttgctagtattttgtggaagattttaaaatctatattcaggagagataattgatcaatggctatctattcctataatgtctgtatctgattttggcagtatggwaatgctgtcctcatagaaagagttaggaagtagtcctcctrttttctggaagagattagagtattgataccatttacactttaagtatttggtaaaatttactagtgaaaccatttggacctggtgctttcctttttggaaggttattaattattgattcattttctttcattagatataggcctatttaaattatgtttttctccacttgtgagttttagtaatttgtgtttttcaaataattcatgtgasttttcaaacttgtcagtatagagttattcataatattgctttattatccttctaacatcyacagcatcaatagttatgacccctctttcatttctaatattagttattagtttcttctctcttactttttttttcctgacagcctgactgtagtttcatcagttgatctttcaaagraccagttttttgttttgttgagttttctctcttgatttcctggttataattgtcttgaatttcccattaatttttacttttttttttctgcctactttaagcttagattgttatttttcctctattttttttaaagtggaagctcagattattcaatttttatcttttcttctaatatatacacaatgctataaatttgcctctaggcactgcttttacagcatcccacagattttgataagttgtattttcattttcatttagttgaaaatattttgaaatttatcctgagagtttttttaagtcatgttttatttagagtcatgttatttaatttctaattacttgagtatttgctagctgtctttctgttatttattttaatctttctgttattgatttctattgkgggctgagaaaatactgtgtacacattctgttcctttagatttgttgaggtacatcttatgcctcagaatgtattctgttttggtcagtagtactaaagtctccaaccgtaataggtttgtctatttgtccttccagttctaacaggttttgcctcatgtattttgatgtgacattattaggagcatacatattaaggattgttatatcttcttggagaactgtgactattttatcaatatgtaacaaacaccacttttatcttcgataatcttcttggctttgaaatctgctctgtctgaaattaatatagctcttccaacatccttctgtttagtgtgaacatgttatatctttctccattgctttacttttgatctgtgtcttatatttaaagtgggtttcttttaggtaatatgtagttagaacgtcttgttttttaaatttactgacagcctctcttcgtgtattgagacaattcacatttaaaatgatcattaatataattagattaatatctagaatgtttgtaactgttttcttcattatatttacttttttaaaaaaatattcacttctctctgactcctctgctattcagaactttatataattcagtgctctctactctcttaacatatcaattttacctcttttaaaaatatgtttcagtggtttctctagagtttgatgaatccatttatagtgaatccatgtccactttcaaataacagtataccactttacaggtcatacaggtaccttataaaagtgtatttctaatctctcccttttattctttatattgctgtcatttatttctgttttccaaaagctacaattatccagtattttgttcctattattattgtgcacagttaactattagatcaattgataataaaaataaaagattttcttttaccttcatatgctccttcctttatataggtctgagtttctgacctatatccttttccttctcactgaaaaacttttaacatttcttgtatggcaggcctacaggcaataaatgtccttagtttttgtttgtccaagaaagtgctttatttctccttcttgtttgggataatttgtgttctttttaaaatttttttggcaacattttgtactatactttcttttttattctacagcttatgacaggacatctgatctaaatcttatccttgttgctctatagataaagtttttctttttttctatggtttctttgaagatctctttatcttttatcttctgcaatttgaacatgatatgtctcgatactgagtttttggtatttatattgtttcatattctctgagattcctgtatctatggattggtgtctgtcattaattttggataattcccagccattattatgtcaaatatttattctttctctctttcttgttattttgctattcccattaggaatatgttataccttttgcaattttcttagagtattggggaattctgttccatttaaaaaaattgttttttgcctttctttttagggagtttctattgacatatcttcaaagttattgattccttccttagctgtgtccagtctactgatgagcacatttggaccttttttttttttcttgagacggagtcttgctctgtcgcccaggctggagtgcagtggcgtgatcttggctcactgcaagctctgcctcctgggttcacgccattctcctgcctcagcctcccgagaagctgggaccaccaccacgcccagctaattttttttttwaatttttagtagagacgggtttcaccatgttagccaggatggtcttgatctcctgacctcatgatccgcctgtctcggcttcccaaagtgctgggattacaggcgtgagccaccgcgcccggataagaccttttttaaatttctactgctgtgcttttgatctccagcattcccttttcartctttcctagagtttccatttctctgtttatattatccatctgttgttgcatgttgccaacttyccattagaacccttaacatactacttttagttcctttaagttccctttctgttaattccaaaatttgtgtcataactgagtctggtctgatgtttgctttgtctcttctgattgtttttcttgccttttaggatgctttataattttttgttaaaagcttgacatgatatattggacaatagaaattgagtaattatacttttgatgtgaggttttatgttaatctggctggggctgggctttgtttaatatctgttgtagtggtaaatgtcagagtcttcagttttctctagtttcctttgatttttttccttctcctrttgctttggggtttccctaagagctccttcttaaatagaatttgtgtcctgtagctccctcagttttaattcactgttataatacagaacctggttgatgtgatggtaaggcgttggacaggagaaatgttctataaccttacaactaaatttcatttttttaagtgggcctgactttgtatgctgtgatcccttgaactacttcttagcctgtttcctccccttaagtaagataggaagctgagatttactaattgccttctcccttaggtcagataaggctctgtaaaatattttcccttggagagtaggctgttgttatgaagaatccttcgtgtgtatttcaaaattgttactttttcattagacaagtattacaaaatggttacttttcttccctctcccacgcctactccctaccttcacttaaacagaaagggatttttttctcatatattcactgagagaaactggttgggttcctggaagtaaaacccatgaaaatgtaggattcttctgagactgggcccctgsagttttgtttgtttgtttgttttttgagacagagtcttgttctgtcgcccaggctggaatgcagtggcatgatctcggctcactgcaagctccgcctcccaggttcacgctattctcctgcctcagcctcccgagtagctgggactacaggcgccctccaccatgcccagctaattttttgtattttcagtagagatgggatttcatcgtgttagccaggacggtctccatctcctgaccttgtgatctgcccacctcggcctccgaaagtgctgggattacaggtgtgagccaccatgcctggctgcccctggagtttttaactctcaagstggttcacattcagcctccagcaattcatgcctccaacacctcattaaaattacctcatttaaatatttcttcgttactgactccattggcttctgctcactgtaagctgaactcagctgtgattttctgtattttcctatttctccagattttagcatggcagtttgccctgcaaccttaattctctgatagatctacgaaaataattttaatttttactttgttcagctttttacttgtggtgaggttgggagtgaaaatttcccagttcttcacatgtggaaatgaaaccagaagactaccacttacttttaaatctgtaaaacattaaaaatactttttaaaactcaactttttcattttttgaggtgacaaattcatatttgagcaatattattcttacaaattaatgattatatttattttaaagattaacatcagtgtccagcttgctcatgattaacaagttcatatgctaaaaactgagagagagaaaataggttgaaattattttaagtcacattttgtaagcaagacttgggaattgtaaggactttttgtcgatttttgtcttactgttttcataacattaaaccatttagcaaggtatgaaaatcaaaccaatttttgacctgtatcaaattagaaaattttagcttcttttcaaaataagactcacttttaaagtaatatttttttctagataataatttactttttaagcattcattttgatagatgtaatcatttagattatgaaaagttggcaatttcaaaagaacatatttagttgattttaagatrctcattttttaaactaacatatctgaaatctgaattgctctcatggatgtttatagtttagtagtgctttctggtggcagggagttagtggtatacaaggtacttgtaaatgttgtaattgattaattaccatagtatttacccaacaattaaatggtccagaatactaagattcctcatgataaagaaataatacaaatgtataatttatacattttttactttaaaataacaaacatagtagaaattaataatcctaaaaattttttatgaaaaagttaagtatgttagtttcaaatcaatgaacaaaatgatttaaatttcacagttcagtaagtgagaagctggtttcattgattgcatatgcaatttgtatgacaagtagttggagctaagagcaagtatcaaatgacaattgtgtgataatgagtcagccttgtaagaacttcgaaaatctaactcaaatattttgcttgcagaaaagctaaggtagcctagaaagacaaagcatggaaaataatttcatggcttggcattagatgaacaaagctgagaattctagcttggcacttttgatgagagctgtgtgacctgcacatagtgcaggatttctctgagcctcagtttcttcaaatagcaaatatggaaaatatttgccttccagtgttattgtaagcaaaaatatactgcccagtacagtgtgtgacatgggtctcagtacatattgccagtatgaattattaagaataatagtatggcattagtgacaggaaatattagtagtagccatataatgtaattattgaagaactagaatggcaaaaggagacttaagttttaatcttaaccttgtcactaatacatgactatgagcatagtgcttcatgattttagatttctgttttttcagttaagtgcaaatggaccaaatgattcctaagattgtatatgaaactaagaaggaaatatataattgcatttcataaagaggtgtgataaaaatatattaatgatttgaagaatatataagaaataaatgaccatgcttttgcacagtggtatctcaaattaatcataactggtaagtgcagaaaagtctaatgacatatttttcactcctcatgaaatgctcatttagaacaggcaggacattttagataagattggaatgagaaaatggcaaaaaataataattaagactttaaaagcatttagccatctgttgtataatcatgagatttattgaaaaatgattcctaatttatagtattcacaactatagaactgagaacactgaggaaatattccatgcaaatgcatgcatttatatgtctttagacttacctaatgaagtaaattaagagatagaaaataaatgatgaaatatttgggattgtattttccttaaattttcagcctctaactcagttactttaaaatggragtgttctttrtggcaaagaaattggagagaggagtgggwggggagggggactggcttaagaaccatgttattattaaaagcagcacataataacagtttgacgtgacatgtaagattttttatcaagtgactttattttgctttatgtgtatcagcctcctgttttatagatttatttgctttttagcctcttatttgcatttttatttcaatattcacagtgattcctccattatttcccacttattcatatacaagataaattctaaagttatttttcatagaaccttcattctaacacttcccttatctgtattctcatatcattgtaatttttgctataaaagctggtaattttgtcaattatgagatattaaattttataatgttgtttttatcctgttcatcccaattagatgataaaaatatctgagaatataatgcttgtaacatcttcctcctttatttgacaaaccacactttgtgctgggcctggacataaatattaaataaaccagtataagtaaaaaaggatttctgacattaagkagctcacagtcttcatagtgaggcacatgtaataggttcctaatagattgattgatactttaattcagcagttgaacagttgaaccaccgtacttcttgaggaactactrtttcatattttcagattataggcattcttgagtgaaagcaaagatccaagccacccgaggaatatagctgggaaaagacattaagatgttattattattatttttttggttgtaagccttcartatctttatttcaaaatgcatattttaatgtcattatatatattttgaagtaggtaatacagaggtaattaagagaaattcttggagagaatgcattagcctattgtagctgtacatatgtggttctttgaaaatagtatggaccagcactgccaaatataatttgatggaagagttctatattggcatggttcaattcagtaggcactagctgcatgttgccacttgaaattgaacacttgaaatgtggctagtatgacttaggagctaaatttttgttaactaatgtattagttagctcataactaattttgttaactaattcatttgaatctaagtttaaaaagccacctgtgtctagtgattatcatgtaggacagcacaagtatacaccaaggcaggcacatgtgtggcataagcatcatggtgaaaccgtttcggtgtccaagacagagttcactaatcagtcacagcaaactcttccctctgagtttgaacacaagtcttagtaaaagcattctaagtcacatcacctaaagaagatacagtgtctaaacagaattatattttcagaactcgttaattttttaaatatatatatatwtttattttactttaagttgtagggtacatgtgcacaacgtgcaggtttgttacatatgtatacatgtgccatgttggtgtgctgcacccattaacttgtcatttacattaagtatttctcctaatgctatccctcccccctcccccaactccgtgacrggccccggtgtgtgatgttccgtttcctgtgtccaagtgttctcattgttcagttcccacctatgagtgagaacatgcggtgtttgggtttttgtccttgcgagtttgctgagaatgatggtttccagcttcatccatgtccctacaaaggacatgaactcatcattttttatggctgctggaagacagtgtggcgattcctcaaggatctagaactagaaataccatttgacccagccatcccattactggrtatgtacccaaagggtaataaatcatgctgctataaagacacacgcacacatatgtttattgcggcactattcacaatagcaaagacttggaaccaaccccaatgtccatcagtgatagactggattaagaactcgttaatttttaagaagcaagcaccaaatacaaattagtttagtttaaaaagtgggaggtgtttggagggggtcatttaaatgaattttcctagtgtccagctgcttagatgatgttatcaattcrgtgtatttaaactttgttattggaagtatgagttccagtcttgcctcttctgggttttatgtgcagtaatgctctccctccaaattttgacaataacccagagcaagcctaggctyaccttttcacagtttaacaacgatagcaaaaacaarcactctttccccggtcattctgataaattcccaggaccatctsattcggacagcttatctcacttgcgccctctagacgtttagatggagtttgcagtttacctctcaaataacctggactaagagcaaaaccctaaccagcattcatccatctaatgggcagctttgatgtataaacttttctgtttagagttttgtgtggattttcactaatgcgcttggcctttcctaagtggacttttcaagtataaattgtctaccctttcttcacaagccatcgtaagcacttcaactcaaaggaaacttttcccaatcctctatgttttctgccccaaaacagtgatgttgaaatcttacaattccgttcctttaatttgcctttgctgctgtgctattcccatgtacacattgcacctccataataatcaagtttattcagaagcaggatttgtgttttattttggrggcctcaacagtgcaaatgatatattctttcctattacattctttcctgtttatttaaaaacygctgctaacaacacaatagagtcatgtgaaatccttcgttttttgaaacattataataggtgatcatgtaagatttatgagatgaaagctgtattttccagagaaatgcattgagacctttgtaatataaatcatatttggagaataaagaatgtaatagcaagaagagcataatgatttattacatgacagtgatgtttaacctactttagacaccacactgtgtttttccatagtaaaacactgataagggaacagcacattactttagggtattatttggtcaggaataaatgggtaatcagtgkattctgagatcacaactagcaagaataatatatatttgttcaataataattttgaagaaaattaatgttaacagacttatatagtagaatagataactttggtgactatgtgctagatccattttaggcatcttacctatatcttattaactctatgcaataatcctagaaatagattttattatttctcaccagttttatagatgagagaaccgtcacagagaggtttactaactttcctaaggtctgattttctttattatggcagtatgtacaatgccaggtttgaagacagcgagttttgtttcagaatctggtctcttaacccttaacacttattctttgaacacgaataagtgatatctaatatcattgagaatggcaattttgctaaaattaagtaccatgtagcatctatcctgataaaagtagtgacttataacagtttaggtggtgtcatttgtaagttaacttcagtccaatgatgaataaagttcaaaatctttttagaaatagcatatgtttgggatattctttgtaaaagcaatgatgagagatattttcaatggaaaacaaattattaaaatcacaaatttttgttttctttctgcatcgaaatatttaacaagtttttcaaataaggtatttcaaaggtgaaacctgtttcaagttgggctttccaaatatgtttgccataaacaaactttcagaactaatttgctgattattgacagaattctgagaaattgtaaatgtcatagtagtgccaaaatatgttaatttgctaatcctataaaggaaaatacaatttttcaaatctcctgtatttcttaagggaaatagataaacttacaggcccataaataatagacatactttaattacatgggtttaaatattccatatagaggctattacaaaagggatctttygtttgtagtacagttataagaaaacaatgaatatatctccagcttttataaaatgttttttaaagacayatcaattgtgtttgccactaccactacatatacatatgtagaaaatcatttctctttggatttattactaggataatatttatctttttttaagaattaatatacttacttattgttattacagtgatgttatgagtcctctagaagtgaaagatgactgtcagatagagaaggggtggggaaggacagatratatgcatattaatgttagagaattagagaactgaggagtctcactgaagactccagggttggaaaagaagatgagtagacacagaattcaatgatgaagaactctgtgatacggaaggcaggaagaggaataaaatgttggctatttcataggtaagcattggaaacattttaattcctttccattgtttaaaataagtaaatcagataatccagatatagtgttgagtaaatcctagagatgagtgacatgagaccacaggaaaatatttagtcagaaagagaatggagaagctgccacatgaagaaagaccatgactgttaaggtctcatctctcttttaaggggcagatactaagaggagaatatgaaagacaaaaatcaggaagtttatgtttacagaaagtttctgagttttaaaaataggtatgttaaaatttgaaactttaggctgactagcaggaaatattttaaaattttgttggaagaaattttattaaagtttatagtctaagaagttgtacatgtttataattagatatatttatatatctaattatgtatttataatagactgaataatagatatatttatatttctcttttatatataaatatatataagtataatataatagatatatttataatagactgaatacagtcagtctattacttcatagaataaagattagaaggaactgaatatattggaaagaacagtccattagttttgtcatttttttaagagtttcattagcaatcttctaattcaagctgttccaaagaaataggtcgttttcacagttgtcccttttaattttgggaaatgagacaggagagaaggaaaaggaggcgagcaaatttttactcacacttaacactgggctggaagttgtggtcactctgagcacatagagcggattaagggacatttttgctttcaaggagctcagagtctggttytaagagatttttctcaactacccctaatgtaagcgtcttctagattttataatgcttacactcaaaatctatccctctcctaaacaatgaaatagaaaaaaacaaaaattcattgaaatttactactatgtgttgtggctataatttttttctttctccttttcttgtcaaactgtgatatcattacctatatgattgagtttagaataacttttattgagcatttattctaaagtagttattatgctaggttatgatgttataaaaatgtgtatcatctgattcagcrtttggtctcttctaaatcagtgttctgaaacaataccagggactcccaaatcctgaaatctgtgcatttttctcaggcttcctttttctctgtggcttttgaccccattgtccaacccatgctccttaaaattttaacctcatgggctgccctttcattcatctgctttacctctctatttttaccaccgcgtcctttaaatatgaagctcatgaaacctgaggttcctgaggttcctaaagttgcattgtctcttctatttttttaacttttctatttcaattgtcaccatcttaaagactttgatcctacttcttattcattctaaccagtagtcgtttctgatagtagggtttaacccagctttctcatctataaaatgaataggttgatcaggactgccttcwttttttttcctctaagttcttttatttgggatctaactccacatctctaaacttcaaccttttcatagacttcaggctaacatttccaaggtatcttgcaactatttaagtgtaacagatttggaagttgaccctccaatccgccacaccgcaagacttcctcctcctcctgagtttctcagttctgccaatgcctctctcccaaacatgcaagcttgacttttgggttcagttctgtctctgttgtcttctttgttgtgttcttttgtccactctgtcaccaagttctgtcttttcccccacctactttttctcatttttaaagtaggaagcatcttttcagatgtatttttttttcttccataatgcctagtgtaaacgttgcacagagtaagtgcttggtaaatatttgttgaatggagtctctcttcttctcttcttgtctgatgcttagtacttgttaagaaatggtgaatcccaattaaagtcaacaaaatgtgaatcagagcaacattctcttttttcgacccatcttaagtacaacattttttctacccatcataagtacaacatttaaaccatctgaaatagaataaactggttagaaaaatagtgttcttctttgagcccctccagaatctgaattcagtgaaaatctgttcaaaccataattctaattaagggttttagctgccaaataatatgttctggttaaagccaagttagtattatggagtgtttcatgaataacagcacaagctttaaacttgctgttgattttctcatgggaaactcaagtaaaggagaatgatacctccctgttgactttaacttttagaaatgcaaagcatgctgaaattgtacataattctcttctaaagaaaaggaaatagcatttcaatggttttcctcagtgtcttattgagttatggtggggcacaattgtgtctgttaaactgatttaccagatggaaggttacattttatatttagctgattaagttgtaagagactggaattgtatctcatactataaaggtcatatataaaattaaaaaatattttgattaactattttgaagcaattaaaaggtttaaactgttccccctcctcttttacttacattaaactaaaaatgaagttattcttagaaataggcctatcacagagttggtatttggcttaataatatctcaaatggaatgtgtaaaacaacagcaacaaaaaaagggaaatactcccattcaagttttggaaattgcttttcttggctatttaatgtattcttagtattttatggttaaattaaataatccttaatttatatacttataccctatggaacttttacagaaatatttaaaggaaataaattatactttttgtcttttttctcttttggatcttctgcaagtaaacaaatacattaataaaacctttaccgtagaaaattaaatgtggcaaagtgctaagtaaatttttgtcctggcatttttgctgtgtgatcatatatcattaatactactctttaattcctactacattacctaaaaataatgcattaaaaatacagcccagtaaaatctgatctagtcagaaccagtatttcagaatattcagacttccaaaatagcaccaatcttggaattcattcaactactgtattattttcctgtggatgctgtaacaaattactgcaaacttagttgcctaaaccaatctatatttattactttacactgctggaggtcatatgtccaaaatggctttgcctgggctaaaatgaaggcatcaccctggcgtgttcttttctggggactctgggaatgaatccctctccttgtttattctggcttccggaggctgcctgcaagctctagctgtgggctgtcccatcctcgtggccactaggaccaaccaagcctttctcaaatggcattgcactgacacttctctgcctccctcttccttattttttaaggaccccttggataatccaagttaatcttttttaagtcagttgattggcaaccttaaatccatttgtaagtttacctttaccacctaatgtgatacagtcacaaattctggggaatagaacatggacatctttggagtggggcattattctgcctacccccaagtgcttagagttttcgttaagatggtgttttctgcagtgtactttgacttactacccctttactattttatgtgaaatttgtttgcgatgcctttatccgggcagtcatccagagaaagttgactaaatagaaggtgtttaactgatgatctgtctagaaaaggattcaggggaggcctgaatgaatctagaggtgaaattttgccttttatatccattcaagataggtaatagtgtttccttataaatatatattataaagagaatgtatgatatagttcagtaaagttataaatgctattgaggtagaattgaattaccaataacgttccaaaaccataaaggttgtctaaaggttataaaatcaaaacttgcaaagcaaaataaataataacagatgcccaggtgacttggaaggttctgaaacaggacaagagcaggaagcaaagtggtatttgaactggggagaggacagtctcctgttggccagaagtcactgctgaccccttgtcagtggtgctgctgatccatggtacmtgaatgtatctgaggggctgtgaagagttgaatagacttagaggttacacctaaagacttaaaattatattgtgagagataacaattattagtaacagtaattagacgtttaaaaaatgtacgtgcatctctttattaagctgaacaatgtgattccctaaagaaataaatggaaccatgttctgtccagaaatctcagaaccacaccaggtgcctagttytcctttatttcatccagtactaacttctgttattgcttgctgttaaatctcccctttcttatcrtgcctactgttttagttcattccctattttgttcagcctccattccagttattaaccactgattccatcatactcctgtccagtcaatcctttgactttctraagtttaagtctagtcttcctaccctctaaaagagccatttactgcctcttctgttatgtacaaggctaaagctcctccatcgcaagcatgatctctgtctccttattccctctctgacctctctcaactctccccagtccactacctcatacccctttgccctagcagtaatgaaaaaattgaaattccatgaacaaatctttctgtttcccattcacacaagccattctcatctggttttccagatgctccttgctcttaaagtgccctcttcaatagttcatactcatctttaaatgctcagatgatatatatacttcctctctgttaagctttacctggtaccttcctacccaccaggccaccccagatagtcacttcatattttatgccaaatgtatatgcccaaatatgccctgacatatctctgtgcatatatctctatattaaaattacattctactcagttgaggaatccttgaggacagtatctttagcctatttattattgtatccccagcatcttcagagagctcataattggcactgaataaatttctgttatatgagtaaatgaatatatgcactaaaataggaactaatacacatttatttgggtatttaaaattctagaagttgttttgctaaataatttttaagaatttaatttgcaataacattttggaggtaggagactaactgcttccggatgactgtaactgggtaaatcagaagaaaacaaggaaacaaaatttttcatgttagcaagttgatgttatagtcttttaaatattattttattttaattcttgtggaatgaaatgacttgctagaggatgattttgcaatttaatgggaattggctaaaaattttcagataaacatcagagagacaaaaacctaaagtaatatatttgaagaagataattgtatggcatttcaaattagacagtgatttactatacttattgtagtcaatgtattccatttattacttctgaactctttaaggtcaggaatggctgttattgtccacatttgcaggcaagaaaattgargcacagcgacattaaatattttactcagatgttatggtggtagagtcaagactggaaaacaactccagactcttaggagggtaacaagatgaggttcatgctgagagaaccaataagtacaataaagtttaggtttatgatgatacccaggatattatcaggggataggtattgcctttctggaccatgaaatcctgacctataacgttttctgggagtaattccatgctgtctccatgtgtgtccctatcaagcactgggatgcaccctaaatagatctcacctactaaaatggccccactctctcacgcagtcagttcacatgtagctcttatgaactgtctgagtaggagggacattaaaacattwtatatccacaataaaattacttttcatgccatttctatttgaatggtatataaaagatatatctagtacagaattttgtatatatatatatatatatatatatatatatatatgtaggaattcgtttgttacagaaagattcatagcagaataattacacagaattttagagtgaacaggacttgtttacaagaaaaaatacataaacacatgtatgaattcagatttcccccaaagtagcatgttatttgtgaaataccaattcagaagtatactttataataaaactttgggattcaggtagaaaagaaaattattttagaaactggattgaagactgaaacatgtttataatctagttcgatttattgaaatgataattcaaaatgatgctagatagatttttaaatttgtcttaggtaaataaaatatatttgaaaaattaaagcatataaaggagttagcatatgaaggcattctggcctgtatgagatatggatttccttgactccaaaatgtagtatttgtgatgcttgccagaaaagagaaattccttctgcattccacatctgatctatgagacctcttgccatgacattcagcatcaagaaattcttagaaattagggtagttgaggttcatctagttctcttctcaacaatatttgagactcagccttttaatgtaagtttccttcatgcttggatgtatacaggcatgtattattcattcagcaactgtttatggagacccatcgagcctatgttcttgctaagtactggaaatagacacaagatcaatgattacattatatttctgctaagcatcaagggctggagccatattgcagtgttttgaggttaggaagtggtagtggcaagtataggctatttctttaacttgactatgaaagtgcaatcacaggaagtagctcataagatctgtgtctatgggggcttatttttatttgaatgggaaatatttgagcctgtctacattctgagaaggagccagaagagagagggaatttgaagatacatgttgcataacctctataagtatctcatagattaactaaaatgtgtttgatayttatctttgaagttttattttttatttagtattccttccctcaccagcatacttaatctccattctttgaatgtgtgggctctgtgcccttggacgtggttatttcctctgcatagaactgcacttctcccacctttacctgtcaacatctcactaagccctggaggatcctctttcaaagcaaatgaatstctgcctttcagccacaacactctgcttatacctatcacgtggcactgatcccagttagtatattattcattcttgagaccatgagcacctaggagaaaaagactctctgtcttttctctgggggagttgcctcagcacttaacatgcactttttcccattccttgattccttgtttgaataaatagctaaaggatttattccatgtagttggcactgtataggtacctgaacaatgaaaatatggctacacatgcttccagtctgcatgaaacttgcaaccttgtttctcaatattattattcaatagctgttaatcgaatgtaattaaacaatagatctaattaaatagtaggttttaattttaactataaaataattagaattttataacttactattaaaatttatttttaaactgaatcacactgattaaagtatttttatgttaaaaatgataatttgttaaaatgtcataaaaattttaggaagttattttttcctgtttgtcctagtattaaaaaaacagtaatgagtagtactaaaagtagtactaaaaaccagtgttactactgagtggtactttttttttttttttaatactagaacaaacaggaaaaaatagcaaatttgtacattcattcattcactcygtaaacttttactgagtttcacctgagccagccgagtgccaggcactcttgaggcacattggtgaggaggaggaaaagtgctgctcttagagggaactgagtgcactgtcatgagctttagatgctaaggaaaaatgcccacctttccccttctagaccatgctcctgttacttacggccccgatattgtcttcccatcctactctgcgatgcttccaatgacttggtagttctctttcccatgtatgaccattttttttcccgatatgtaaagaggttatcattgttgtttccatctgtgataaacgttaagaattaaatttctatttacattgatagaaggaaatacaacttcctagaaaactcacacaatgatgtacataacagtgctgtctttcgaagcaaaacaatgtgtagtacacccaagtgtccaacattgtcttattcttaagtgaaatattgtgtattcacatgtaagtgtggatatataatatatagtatatcctcataatgtatttttaaaagaatatataattgcttggggaaaaacataatagatttttaagtgaaaaacataataaatgcaataattttaaggaatacgtaattacctgggaaaagacccataatatattattaaatgaacaaataagatataatcataaatataatgattctcattttcaaataattttacctacataacacaaagggaacattttagagtatacacaaattttcccattcttaaaaatctcaaatatgtatgacttacataatcggaagcaagcaataaaatttattataaaattagcacttttcaaaagatcatattgtaaattgaktaacatttacaaatatggattttgaaaaatggtaatcttaacaagtagacaaaattggtatatttgcaataagagaatggatagatgcagtagtatttctcaaaracaaatagtattataatgtctttaggaaattgcattcatgtattaccatacatgtgcctagaaattcccccaaaattattttttgaaaactttatatatgaattacatactgttaagtggttataattagaaatagttacattagaaattttgctccttagtgtcaaaatatataaaatcyaattcataacattaaaggttcattttatcccagccagaagaggcatacattgtattatttattgtagtatgycaagtagtacttttgaaaatatgtaccttttgtataattatgaaacttttaattagagtaacctgtgtattttgattaactagactggaggatctactgtgttcccaaagtgtctttcataactgtagtgattactgatttgaacagtttctagatttctacaatgccagcctgggttataggagagatttgggcaggaactgtgccaggaaatctaaccttcagaaagaacagagagtgaatgaataggtgatagattataataagtatttggttccaagtaacaaaacatttaaatatggcagctcctaagggatccctgagaggaggagatagcaggagaaacccaggggagggagaaactgtgtggagaagttgacagatatccagtactgcagggaagaatagacaatgccagaaagggatctgaagctggtggtgaagacttgaccttcacctatgattacagagctaaatgttcactacaggtggaatcattgtatatcccaaatattcattattttaaaaacatgtatgtatgtatttatttatttagagagggagtctcgccctgtcacccaggctggagtgcaatggcatgatctcgactcactgcaacatctgcctcccaggttcaagcaattctgctgcctcagctcccaagtagctgggattacagggacgtgccaccacacccggctaattttttgtatttttaatagagatgggttttcaccatgttggacaggctggtctcaaattcctgacttcatgatctgcccgccttggcctcccagagtgctgggattacgggtgtgagccamcgtgcccggcctaaagaaacatttattaatctagtactcaatcttggttaataattaatcatcttaatatatgaaatatgttaaaatatttatataatattaacacaatggaaaattttccattttttccttatgataattttcaataagaatgaagaacttctacataccacacaatgtggtattgaaattttttaatctaaattattgttgtaaagaatattcacaacctaggattaagagtgaacagaggccgggtacagtggctcacatctgtaatccyagcactttgggaggccaaggcaagcagaacgcttgagcccaggaatttgagaccagcttggacaatgtggcaaaaccccatctgtataaaaaatacaaaaattagctgggtttggtggcatgtgcctatggtcccagctacccaggaggctgaggtaggaggatctcttgagcccaggaagttgaggctgtagtgagctgagatcatcccactgcactccagcctgggtgacagagtgagacccggtctctggaaaaaaaaaaaaaaaagtgagcagaggcaaaatacacatagtaggtggtccttcttaagtggatgatgatctagttaagacttagaactaaacagaatacaatttataagcaggcaaattagaaagtgagaaaaatatgtgaagtcagttattaaccaaaagttattttaagtacactgagtcaaagttcagaaaagggctattgttatggttatggtgttttcaaacattacactaggcaaaggagtgtaccaattgcagccatctctctctctacttattttttattttgtttaattttaacataacttcatcttacatctgcacttcatgaaacattcattcaacatctatgtaatgaacaattttttttttatgatagacaaccaggtgagccaagaaccaggatgtgtggtaggcattgttaccattcttttgtagatgataaaatgattcacagagatgaaatcactcatttggggttacagttagtacatcaaagagttagcattggtggctgggtgcagtggctcacgcttgtaatcccaacactttggcaggccaaggcgggcggattacaaggtcaggagctccagaccacccttgccaacatggtgaaaccctgtctccactaaaaatacaaaaattagccaggtgtggtggcacgcccctataatcccagctacttgggaggctgaggcagaattgcttgaacccaggagggggaggttacagtgagccaagatcacggcactgcaytccagcatgggcgacagagcaagactccattgcagggggggtaaaaaaagcattgggatgagaggtctggtctatttgtgtcagagtcctgtgtgcttctacacaagatagtttgtgtgcctgtctgcatgcatgtgtatacaaaaatcaygccccgcaattatgtacacagtcacacatatcaatctcttagtaaaatgacaagtctgggcagtgtcactcactgtaccttggaatcctaattttttaacctttgcttccgccacctaggtttactattcctctcccatgttttattctcatacctgccaccctaagtttattgtgtaccatggagactagtatgagaatgaagatttgaaatacctttagttcatgaggcattcttcagatattttctgtttccttttattgaggatattttcttttaggtgagaagagaaaaaggtattgggtctgttctgttttactattgattgttttcacttaaataatgatagccaatttttatacaaagttttcatctcagcaggcaaatgtattcagatgagcacacacactaaaaagcttgccttctgtttctatgattaattgagatgtagagaatgatgggtgtggggtaaaaatggaaaggtaattagtgtaactaggcatgaaatacattcatatacaagcagaacctctccccagctagtgatctttttctgggctctgaggatttgcatcccattagtaagtcactggcatggaaatcttcagcctttggggagaccagagcattaaaaatagaattaactctaactgcaaacggagtcagcacactaggccattaattcttctgcttgggtatatatcatgctgagcttctgtgtgtgggcttctgaaatgttaggagtgagttttatagagcattgccaggactaaatgatagttatctatcatctcatctctcaccctcactactgagattttaatatctctcatgacccaaaacctgaaatacaggcagaaggttttgctagaaacattaagtaggggcctttctttagagragttgtatactgtatattttgttaacataaatctatgttgtgctttacagtatgtcagagattccttattttcaaaaccttatgtcctcagatcatcacaatgcctcaaatgttatcctttctaaaactgagaattatgcctttttgcataactccaccaactaatgataaaagttgcctagtgttattatttttagaaatattagtggtattggaaacattttaaaatcaacttccaagtataaaatttattgaaacatttaatatatacaagctacatagagtactctcaatttctaataatctctcttttcttttcttcccttacccttctccagcttctttgggaatctctgacagatattattttctttagtcatcccagagcagtacarttattaacagctgccattgactgattgcctgtcccagggtttctcatacttcgcactattaacatttgggtaaagataatactttgtcatgggatgctgtcctgtgctttgtaggatgtttggcagtacccctggcctgtacccataccagatgcctgtagcagctctccatactgatgaccaaaaatgtgtccagatattgccaaatgtcccctggaagagaaatcttccctggttgtgaaccactggcctattctctactagtcactatttcatttgatcctatagtagctgcaagatatgtgggactggctgggtgcagtggctcacacctgtaatcccagcactttgggaggccgaggcgagtggatcacctgaggtcaggagttcragaccatcctggccaacatggtgaaaccctgtctttactaagaatacaaaattagccaggcatggtggcacatgcctgtagtctcagctacctgggaggctgaggcaggagaatctctggaacccaggaggcggaggttgcagcagtgagccaagatcgtaccactacactccagcctgggcaacagagcgagactccatctcaaaaaaaaaaaaaaaaaaaaaaaaaaagatatgtaggactatattaatcaggatcctggcagggaacagatctttgcagcgtgggtcatagacttttatgaagggactacttaacaaggaagttagtaaggttaaatgaactgcttagggaagtgggggtacccagaaaatagcaatagtgggaggtcattccyacaaagaagagaggggaggaaatttttcctggagtgctggagagctggagccctggaatagtggcttccagagggagatgaagtcaggaagagacatagccatggccagttatgcagcactgtgacagggagagtgtaggacagcctggcctctccctcctccttaattctttggccaccagcctgtcctgccagtagattaagcccaagtgaaatccaaccagcaaagaactagagtgttgcagctccaggattcagccccyatgggcttagagaaggaaggacaattgaatctgttggggggaaaatgaagaaaatccctccaacatccccattttaacatgagaaatcgaggtttaatgatataaagtaattyatccaggcatctatttgactccaggcacaatgaaggtatcatcttagttggtctgtgtgaatgaactgatgttcagyaagactgtgaattattcaaggttactgattttagtaggtggtagatacaagactaaaacccagttctcattcctcttctggtgtttgcttttttatgttgaccattgaaagaaatctgagagctctatatctggctgattctcaagtagacaaacaggagtgaaagctatctgctgaccttaaaaatcatttctttctgaaaatcttggaaaattctaggtttcatctagaatgtttaaatggcatatgctatttttccaatctgtcagcacatttttatcttgattgcagacactcagccccagctgatgcaatatattaggagagggaggaggacaagactgagaataaggagatttggggcccagttctggatcagcccctcttagctgtataactagccttcagaaatagtaccaataatatgtttcataaacccttcccttctacattcacccagatcttcacagttattctcaggtatctaattggaaaggctttaagctatgtttcacaaatgaagaatcaggcttagaaagcactataatctcactgcaaatttcataacaggaaagttgtcccatgcagactgaattcacatccctcaatgaaaatgcatggtcttttctagtccacccactgccttttgaagtgatcaattgatttactccctatggactgccmgtttgcagcatttaatccattaggttgcattataaaatcatatctccatctaagttctgagaatctatgatttcctatggttattagcaaggctacagaggataccaatgtagttagcacctagggattcatggktctttatttttcctttctaggttttagataaatatatttattatctataactttttggaggcaagatcaatatttttgaagtaatttaaaaatacatgtgtacatgaaaacatatctaagtacattaatacagtcccagtatctcactttattcctgggtaagttgggggttagaaactgagatagattcctacactaaggtgaagtgtgttgccactactggaagatctggcaagaatcctaatcctttcccaaattggttggtttgtttgccttcatgtgggagtcccggcaagtgatacatttcagatctctatcactttgagcttgtgctcacccctgatctctgccccaccttttgacaccctacttttacagcattttcgggcttttggtttttttatcttttcagtattttcaagcataaaatcaggtttacaatacaaaaaaagtagctttattttttgtatctgaacttcatttttaagttcctatttcaccaagccaattccaagaaaacatataatgcaagagttctccatcgaagcttaaagcaaaaagtatagatatttgaagactaaaacaacaaaaaaagtggagaagaattgtaagttctacctttgatatcccttgtggtctgtcaaaaatataaattccctcaaaaatattttcactgataaaatctggctacattataacattgtgtctgctctagatgattagtggtgctttgggaaaaactattttataatttttatgatgataatacataaggaaagctggaagagcaacattttcagtatttagaatagacttatgccagactacctgggtacagagcctggcttcatctccttttacctctgtaaccttgggcaagatacttaccctgtctgtctgttttggtttcctcattgatctaatcaaattataaataggcataggctttccagatgtttttatggttaaacaagttgatattgataaaacatttagaatagtactggaacataaaaaagactatataaatgttaattgttatgagaaatatccttttcatgatgatcattaccaccaccatcaccaccatccacttctgctgcacagagatgcaatccaatgtttccattcttctaaagtataattattttgaaataagtggtattattttaaaaatagtgaagctctgtaataagcttcacwgtttagaatatgaaataaatggtaacatacatgtgaataatgtgcatttgtaytatggaatatataacctaactcagaaccttcaattcgaagacttagccaccttttctttccagctgatagtatactgcatgtatagaatgtcttatttgcattgattctagttggtttggtgtcattacactgagtatgtttccccaaggttttagattagaaactactgacaaagaaatattccaggagtcagaattagacataaattatatgctgcagaggtgtcttcttattaccacaagccaggtcagagtctctaaaatcacattcagttactcttttagtggttattaagtttcacccttgagagaattaagaggcctgacaatgaagtataataaatcttactgtgacccaaacacaattagtaattaaacttcccattaacaatcccaaatctgctagataaaataagtagaaaacttatatttttgtttactttttactttcatatttagagaagttgaaaaaagtttcacagatttcataaaaataattgcaatatttgcctgtttcattaatgtagagtcaatgcctcatttatgtgcttgggtttttcatttgagaatgagaatggaccaagaaaagggtgagactttttttttttttaacacatgagcaattggctctctatttttttaatttttatctatttttttttttttgtctcaatccccagcctctgagcccaacttgaaggtgcggtccaggttaaaacagaaagtggcagagaggagaagcagccccttactcaggcggaaggatggaaatgttgtcacttcattcaagaagcgaatgtttgaggtgacaggtaattgaggactgggcagacctatgaatgctgggagtaggaatgaaaaaaaaatagtttagaataaatatacctgctgcatattaaaagttattttgagaagaaatatttcttgaaaggaaattatattgaaaactcacaagtagttcaataaaccttgctatgcattcaccaactgtgttaaacaggaaatgaatgaaaaaacagaastatgtgtcaatcaaggcataactagggaacaccaaagctcaccttattcttttcaggaacaggcagtccattttgggaatgccaaccaggagaatataatttttaatgaaatttgatcagaaatgagcagagggaggtccaagaagaacactttcccctgtactcagacatgaatgtacaaaatacatctgggaaaattaaactacatggaacagcaaaaccttgacttttcaacaaatttacagaactcataaatgactttatgtgtttactagtgaagtgggacttatggcaggagggggatatattgctttttatgaaggggaagaaactgtcattttcatgggtctcaaatggaagagttatttttttagctgcctgttttagtagaggggttaggaaattcaacctgaggtcttacaacacccctagttccagttgtacctggtttgaaatgaaagacctaaggctgtaagaaccaaaaatactagccaaaatacttctacttactactgttttttgagtacctacttagagtcaggtactgtatctagttgtttcctttggttgcatgaagaaagaagtggtaatctgcaaccccttttttttcccattctcaaggaaaactgtgcttataccaatgtgggcagttggtattagttctccaagatcagatcttatttttagtaagttttaaaaaaattctttattttctgtataactcttttggccatgacagtgtctacaggaaggcaatatagaggaagactgtggaagtggtggtagaaaygtgtatttaggttctaatgcaacctgaaagtttggccgataatttttggaaaataatatttagtctcctattcaatctggacaactttatatgcttatctgaagaaaagtgttagtgatttcaatggaaagtatttccttgggataagaaatattaaatctgaataataaatacaattattttactagagtttatatgtattatccaacattaaatataatcaytaatttagacgaattgaattctaagtttggagttacagacttttttcccaggaaatactattgtatgtaagtaaataaaaatcttaggtttttctaatagaggtctttgatgggggtgggcagttgaggagtgaatttgttttaatgaatgtgaagaattataaacctatcaggtgtctaatgtaaatgtagataggtggtttttctaactgcagaaagtaagccccttctaacagcaaaacttctagaaaagacaaaactgaatataatgctattttattttgcttcatagtcttaatgtctgaagtcatatttatttatcccaatgtgcttttctgtgttcctgtagtctgttttcttgatcatagctttttctacacagtcactttttcttccgtaccaaattgcagtggcatttagctcaatacctatctcagtaatgattggttcttatttataaggattatgatttaccagagttttactcgaatttccttaaatttaaaatatatttctcttcttaatttcgtgagataagcactcgccctttcacctcaggaaacaatatgtattggaagagagacttgtacatttattagaaagacatttctggtgagtggacttacggatgctttggtagatatttttaactggtataccgcacttactcgaaatgtctttggaggctccggactactgacacacagctgtcttcacctgtactccttcccattgctctgccaactttcatctagtttggatgagatttgtttggatcttaatactaaatatttttagtatctagtcagagactatcataacatcagagcagttcagttgcttttgctgttatcctcttacctctatgtcttttctctcttccscatttcatagattaaagtgtaagctcttttcaaactcattccactcattgacatgggaacccacttgccatctttttttttcaaattcaagtattttctgccccctacaaaaagtcctgttcttttcaaatgttaaaattgactccccctgtgcctgcaatgccttctctgccattctccctactccaacatccttatttcattggctacccttcttcaagctccagttccaatatcatacactgagatcagagatctcagaaaatcagttgctatcttctcccagatcccatccagtgtcatgtcatagaatcctctggtacagtagttgttgccctgaattctagtgcttatcacagtgatttctacataaggaaatacttcagtcttaatatcataaaataatataaatattataatttaaaattggtaagacagaatgtttaagaaagtagtttttaaaaaatatggaaatggaaatgatatggaaatgagacattaatgagaaatcagtcatattgtaaagacgagagttaggagttgggaaaaagaagctcctgtaagaatttttaaattctacatttcctttgttaaagtaaaaccagaggtgatgattaaaaaaaattaatcaaaatataaaccagatatatagacagaaaggcagtgagcaaaatgtgtttaagtattttattatactaataatttgctcaaatcccacagtaaataagtggcaggattagaattcttacattaacctcacattctttccagtggtactgcatttctgagtagagatttaattataatacaagttgagagttataggtgttctgagagagggtaagaaaatattgcttggaaactgggtgttccctttctctgagggacatacgttatatgagccaggcttggaccttataggtgggattcggcctgcaatgaaatgraaagaaaggaggatacaaaagcatgaactggaaaagtatttggcatgaaaggagaataggtgatttaatttgactgagtgtagagtacagaaagggcaatggtgggaaataatattaggctctattttggagcagagggacatggtgtgagttatctctgtctgatccttttgcaagagtttgaaagaaaggtttgagagactactgtagtgactcagaaatatkagcagacttttgctatagttcttgacagaataacaaggccttaaactgaaatgattgtagtcagacatagatggagagatagtgtaaagatcacatwaaaagggcctagtaactaattagatttgcagtaaagagagagtgaggatgactctagggtgatgaaaaaatagagatatgcaggaaacagttaatattaaaatacatacattgagttttacacatatgtaggggagcttggaaggtccagctttcagaggaatttgggctggaatttatgagttaaaggcaagaaatgtgactttcctgagataattctgccccaaaatgacatatgaagtcatgatactgagtgattttgacaagggaaatagaaaagggataaagtcacaaacttaggtgaatgtctgaatttaggaattggtaggaggaagaaaagtcaaagagatgggaagacaaacatggatgtagagaatgccactgtagaaaggatgtggaaaggaatgttttctctgaggccttcaagtgtggtggcatttgagagaacagttgcagttaatagtgggtaagctatattgccaaggcttgaagaagtgagtggacattgtgagagcacaccatttctcaagaattactagcatgctgtcagactagaggggcaattccagtgtaggaggagggcctgaagattccacctaactaatccttttaggatttttttaaggggatgggatcatgggtaagactaaatgtgtgagcgttagagaggaagagaaatgccttatatttgaaatgggaaaagagaatgtagataacataatcatgagtagaaagaaaagatgctggtggaaatcatrtcaaaaatcctgtctctgaaaagcatgaggcaagatcatttgtgcagagttgggttgacaaggtgtaatgatgaggcagctaggaagattttgaaatgagtgaagtgtagaaggtggtagggaattaattagagctgaataaataatttgccaaagcttgataagatgacttctctagctatatttctaggaaayggaaatttayatttttgattaaatgttttaataaatgcattagtttctgcataagttgaggtacatgtgaatttcatatctgaagaggaaaggatgggttaaataaagaatctgtcttgttgttgcctgacttttgctaaaaggaatttcttgttatattggtatttacaaatctacatgttaaatttaggcaacttctcattttctggaaaataagttgagtagagttaaagtcagatggtcttgtacaaggtcatcagtgcaatgttgagattttacattctattgtattttcttcatataacttgaactagtatatgcaataataaggtatagccttagtatattaaataaaaaacaatttacagcacagcatttgaacaatttttttcagacctaatggaatgggtctgaacctcatgggttaacgacttgtcttttgatgtgcacaagttcattgtcttcattactgttattttctgtaatagcataagagcaagtaagaaaagattcctttcttcagttttttttttttttctcattcaaagctcctgtgaccctctctaactggatatctttacttctctagaaactgttgaacactatktagtatgttttgccatgaaaacaaaggaggaawaagtggtatgaaaattcagagttactgcagaaatttttagttctttctattttgtgaaatagtgcttgcatttacatagggggaaaataacatgcccaatgttacatgttacagtaactaaagttcatctatgtatgttcctcatgaacacatttgtacttcacaatatttttcagaatcctcagtcagtagcagttctccaggctctggtcccagttcaccaaacaatgggccaactggaagtgttactgaaaatgagacttcggttttgccccctacccctcatgccgaggtaagacccttattattttgtttcttttaaaaactgaatttctgattagctacctaatacaaagtgatayttctgagttgaccttcaatatccaaatgatatttatgaattgaagtttactcagttccacatattgtaaaccaattgaaaaaaattgatatttactaactaatgtaaatattataaacctataagaaatgaactgatatttattagctgacataaataaatatcaatttttttcttacagattttttcttatttatggaattcagtaaaattgatcttatttataaatcagacaaccaaagatgtttggaaggcaatctgggcttgaaatgtaatcctcagtcaaacattcttagtgatcctccgtgcacactgcctgacaattatgtaacttactagtccctctgcttggttattggttgtgccgatgtgagtagacacatcagtaagtaaaaacaactcgtacaggcctctcagaggaagaacctagcgaggtggatttttatccatttgaactgaaaagtgatgaaaaataattgcagtattatagttgaagggtgtkaagcttcactgagcaaacattttttgagcacctgctatattcaagtcattttgcctcacagtagggatataaacatggacaagatatgaactctatgtttgaagaatgacatattaaaggatattagtttaaagtaacacatgatttagtgtaaccaatgatacaagactaagaggaaagttaatgtaaaagtcagcaagaatttgtctatgtagtttctgtataaggctatcaaaggcaagagtctgaaaatagccactcatgaaatcacctgttttgaagtcatcaacaattgactgaaagccttatttttgtttctgttattatgccttcttcactgtgcattgctctgtgcaaggagagctggtgcgttaacttctaatatataacatacttcttttgttatattttatagagtcatggtaccttgagacagaaagggactggtcaagtctcttattcttggatcatctccatagcttttctaccatgtggttatccagcctctgttagaacacttctgcttatagggagctcacttcactgtctcctgaggcaacccagttgattttaaatagttattttgactgatatgtctctgtacagctattgctctgtaatttcatatattttatacacacaaacacaatatgatatgtataataaattatttataagttatgaaattatcaggtcagaatataataagtgaaggcagaaatccagaagttgtctctgatgagcaaaggactgaagccagtaaagtcagttttgctctaggcacatttgcacacttgagttttgagctttggttttcagggcctcagaaactcaagagatagaagataaagcctagtaccaaccagggaggataatctaataggagatcctgcaaacactaagctgacaccccagaggcctgtatctatgttacattgattagttgactgcccctcttactgctgtgtcccctgccagcmcccmctgccctgggctgtctgatgtggaacagagcagagggcagatcctctctctcagatgtcgtaaccacaagctagtccttgtgtagatctgtagcccaaatcatataacctcaagctgttaacttgacttatcatggcaccacatttgtagttcccacgttaggagtctgcacaaagcaaacaaaaactcccctggaggaatataccttccttctagatttcaaaaatttccctcaaataagtttccaagaaacatgagcaaaatatctagatgctgtcgtttgaccattttcagctatytaaagaatagtaattctggcctctacatggtcttcaggtcccgcatctatttcttacttactatcctgttacccctctttatctttttctttatcctttcaaaaacatgatagcagatggaataaatactttgtttatatttgcagccagagacataagtggagttattgggttattagttgtagatagcatctttttgttagtgcagttatatctggatattggtccattctctgcaactatttagtaaatttccaggaaaagaacaacttggttacaattttttttttcaaaaaattttagattgttgttatctctcagtatgaagagtgtaattcttagtaactgcaaaaacagcaaaggatctgggttctaatcagtccctggatggattttgtgccattgaaaaatgaaaacaacacactagactacattcagcagcatgtatgattctgagaaatgcattgtcattgcaatgtttcagaagaccacttacaacatgggaggattttattaggttcagaaatggtaataccatactttgataatatgtagtaatagtatatttttaagaggcgagagagtgatgaacacaaaatttagcatgatgattacctttcaggggggaagaagggggaaaacatgatttgatagttactaaagaagatacatatattccttcattgtaaatacatatgtatgtgcatatagtatttagtacaacatattggaacaaccagtaagtatacatcagtgaagaaagtaaataaaagattttgcttatactgttttaatctgttttatatttctaaagccataacttggcacaaatcatctgtttaggtaccctagcttttcagctaattgttgaacatattctctcactgcaaacctttcctttcacccccaccattaaaaaaagaaaaacaaaacaaaacagagggaaatgtgatttaatggagtttaaaagggtagaggtatttcttcaggtcagtgacaggacattcacctccaaatctggaaagacgagttcaaaagcaagcagtgacttacctcataatgaattaattgtgtgcctgaactatgatccaaaaggccaggtgggcagacctttatgcactgatgagtagcctctctgtggcccagaacaaaaaatgcaaccctgatggctaacatgtggttttctgctgtattgcatttacagagatctatggtgtaattcattctcgataggtgaggagacagcggaatttagactaagactgtcagcaaattaatatcctagctttttagcactaaatgtttccacccaaactggagaaaagaaaaaaaaaatttcttagccatagttgagtaaccatcatttagaatttaggatgatttttacagatgtctcctaagattgatagtagtacgggatttcatagcaacaaatattttgggggtatgaattatttgcataatatattgcactctaaaaaaatggttgcatactttaccgtttacaaaattggcttattttactgtttttgcttaagcaacactggtaagttttcgtattaaagtagtgtatatttgaatgaagtctttattttatggcctgtaagtagaaaagcatgtcacctaattcagagcccatgtaaatgaatgggattctatcctattgtgctgcttcagaagtaggaaagtcaggctatatctaaagatcttgagccctagatgaaaacaaaattttctatcttgtaattcacatgtcctgcctaatttagataaagggaagacagaagtaggaggagaatttactcataaattgaggttcaggaaatagcacattgtagtagaatgtatgggtgttccattcagaagactcagcctgaacctggctccaaaaccggctaccttgtcatcattggtcaagttgtcagacttcccctgacccccagattcctgatctaggagaaggtagtaccgtaatacctacactagcagstttgttttaaggaatcagtgtttggaaggcaggtggtaaattgtgaagttcggaacaagttcattttttgttgttattatcagcgctgactcctggtagggaaaactcattagcatgtttgtcttcaagccagcagctctcatgtgagagtgagtctccatctgctctgaccacttctgttccatttcttctatttcctacatatgctcagtcccagaactcagattgttggagctacttgctttactcatttgtaaacttggttrgggagctgaaacctcaggggtttctatttccaactccagtcaaggatgtctttacctatctagttactttattgttaatactgtgggcctgtgggttcaaatatgtttccatggatatcaacactattactttagattcagtagatttatttgatagctattttaacggtagccaagctgctggtttatttctagttgaacattagtggctgtctctgctatgctattttttaaaataaattttccagcasatacaaatgcttttaaaaaaggattctaataataaggttaagtgttctaaaatcatctgtaatgtcacttgttttgccccaatctcacatgactcatctgcctgttgtttcataatagttgttgtgacatttgcagtaaatgttatgctcccttctgagtgggtgtagagctgtggttttagatagcagcaaataaaacacgttccccccacccccaattcagggaaaggaggttgctatgacaaaataatcatttactaggaataacatgagtcaatattttaaagtaagatctttaacaaaacatcagtgcctttcaaatgctaaggaaactctgtcaaatgatctttctttttttgttttttgttttttgttttttggtctcacaatatgtctcaccattttatagtaacaccttctttggtgtccagtaaaatgaaaacttgagagatttctactgcttcaacaatttttttaattacgtggagattttaattttctatgagctatctgaaagaagagtagaaaataaatacaatcttgaaaaatcccatgaaaaccataggcaaatattaaatgattgaggcttttcttttttaaaacgtggctatgttctttttagatagcctggattcagggacttgggaccttgtaaagccaaagctgattgacactcataaggatgtcttcctgtatgccattctaatagacacacatgttacctgatagagctgggcagaggtgcttcagtctcaggctgaaggttctgaagtccagggaagttgggtgctgcccagggttacaagcyatgagtgggagagctcaagtataagacacttaggccagacttcgtttcacaagtccaggctgctcctcaccaaaattctgtgtgtatatatatattttttctttttctgattctcatgcatattgtagataatttggaatatacagtaaactgaaaattctatatccacatttctgtgagctttttaaaatgtgagtgattactggccaggcatgggggctcacatctataatctcagcaattcgggaggctgaggtgggaggataacttgaggcctggagtttaagacgagcctgggcaacatagaaagaccctgtctctacagggagaaaaaaaaaaacctaacaaacattagccaggagtttgagcccaagagtttgaagttacagtgggccttgatcgcaccactgcactgcagcctgggcgacagagcaagatcctgtcttaaaaaaaaaaaaaaaaaaaaaaaaaarggaaaagtaggtaattatttacataactagtataactagcattctgtcaagggctatcattgacttttttgtcttcttaagagtaagaaaagtatttgtttatcttcttctctttcccttcctccttttttccctgcctccctccctccttccttggttccttctctccatctcctttccccactttcattttccttgctcctggaggcatcattctctcccgtgttcttgtttatatgaatttttacatcatatatattttttactttgcatccatgagttttaatgggatataaatggcacaatgttatctgcatcattccattttcttgcttttatcactaagcctgtgtttttacatccagacaccatgtctttatggatgcagaagtccaatggtgtgctttcaatcaccacaaaaatccatcgtgggtgctgccgcgtactgatkccccgaggtagatgtcctggtgcccttcaatatataccatggcccatcatcctacagcttaatgagataatttctcgaagttagaattcccagcaaagccatcactgggtcatggtatacagaataattattttggtttaaagttcagcagaattgctgtaccagactactgtcccaccagcatcatatgagagtttttasctttctgaatccctgtggcagttgacattgtccatttttctaattatacccagtgtcccttctggaagacattctcactcttttaattgaaatcagtggcttaatttaaattccacataaatagctctattgagaggcataatgttccagtccatgtgttttgtattcatttgaattacaaatattatttatgagatgcccctcctattgacataacaggagagaaattaaataagattttgaagagccttagtaaaatgtgagtaggccacccctaccccagcacttggcccatttcatatctcatgtcccaacataatgctccttcctctaattacagtaattatcacaagtcaaagaattagctctttacttttctgtgcacctaccatgtgaattggtgttttataggacatctttgtacgccttgcacccaacaccattaatctaagacagagaagttacccgttaattgttttgtgaaggttaaacaatagccattcatacatttactatattcattttatctaaccacaataaaaatctttggttctgaaaaattttcagattaaaaccgtcatttccatgttctaaactgcaaagtattggcatcatagcaaagcactgatttaagggctgggccagattcaaaacttcttcttggaaaaatcttggctttgtctgaaaacacttgtgagctcactgcaatgctaaggtgggatggtcttccagccttgcaagaatgctagtcaggatctttcattgtgtcaggtgaatggtacccctcccaatctgttagtctgactttaaagtgtgtctgtactcaattagcagtgtagactatggctccaggtcttattaagagataaacgtggaacagatagactgctccgatcaaaaagcatagttgaggaaagctgtatttaaagaaaataattcaagggaaatggtttttcatttctctgaagtcatcctagaccttgaaagtctacataaatgctatgcctgtttccttatctgtaatccaaggagataagctaagcaatgtcccggtctgtaaagtttctatgaagacgacataccagttaagagtctttgggaagaaccaactatacctagtagatatgggggacacagaaccatccttgcttcatcaagaattgtctccatgacttgaagatcctgacatttataaagtcaccggagcttttttcttgtgccaagtcccctgactcccagttgcactcctttattcctgccatgagcttcagagcctgagtttgcttcctcttctcctccaaagccaccaccattctccctacttttstgtggttcccctgtcttccagcagtggctgcagagtcatactccctgtagcagcagctgtcaacaaatctcatagccttggtcagtttaaaggttttgttgctggtcccacatggaagcaaaattggggaaatgactcagtttcctcatcgacagcatgagcataatggtagcttgagagtgcctgtgaagaataggttagcctccaaaaaattctggcccaggacaccatggtaggtgctgaatatcagtacactgccagaggaaatggagccactcaagttttataggaaactacaaagatctgcaatcccagagtaagactgtccccaaatctcttcactgtagtcaaagccagtgtgaggagccagtgtgttgctgccattattacgtctgagaagataatctatttctccttttagtttaagtctggttcctgtgatgaggtgggaggatatcacagaaattctctctgggaaacaaagaaaactcttttgtgaggtctatggtattttttgtgccattctcccagtccgtgtcaaatcccctagtccatatcttagtgctgtgagaagcagatataaccttgaatgaatattatgccctatttaaaatgcttatttttccacacttattttctcttcaatgaatacagataagtgaataacatatccttttattttaaattactatttactgccaataagctagttaaaatatttttacttccttatatgttccttttgttcttgtacaggtattctatacttacaattttcgtgaaaagcttattatttgtatgagtaaaagagtagcttgcctttttgtgtacagcaagtatgcaactctgtctgatagctcataaaataaaattgcaaccccacacattgtaattttaaaatctttcccaacaatcttcatgctatgtcacttagacaactaattttttaaagggctgcatataaagtcaatgtaatgttattgctttcaacatacctcttggttttcatgcacaaatatctgacatgttcctttaagaagtaacaaaatctgaactagctttgagttccaagttgcaatgagaaaactccacatttaaccttgtgctcttattatgttaagactaagactcatctccaaacaaacgtatgattgagatgatgttttggaataacatcctgtgttttggtggtgcatcactcttcagtgacattctgaggttgcattgtatcagcacatgatattttccccggttaattgatatcccaggtttgtccaggggaaaatctacagctcccccaaacatgcttgacaagttattatatttactttagtcaaagcccgtgtgtgcaatatccctcttggaggtggtctattattggagtcccatatgctttttgtttgggaagaaagcagccactgtgtcatactgttacatggagtattctttttcagggatgttgttcccttggggaccatatcaggccagagttccttagtctaataagacctttgtaactcttattgtataaaagttctgggagggaggcaagagttaaacagaaaatgtaattcaagcaaccatattaggccacatgtgggaaaacatgactcttagtaatggattaaaaaaaaggtatttgttgtaaaaagcacagtgatgccaaaacgttcagggtatttcaatgtaaatgaagcctactgtggcataggactcataacattttaacatttactttagtttctgaatatgaatgatctaaaaatacaccacacagaattgtctattcataaatgtttataagtaaaaaagatgtgattactatggaagccctatatggtgatatttaatctaagatttttcttgggtcagttttcccatcaataaaatgacattaaatgaagaatcaggtgaagataatgactgtggtggcattatatacatatttttttcactgagtaatacaaaagaagtagacatactaatcagaattatccaattttatcattgtactttatcagcagatgacaaacatgctgaccatattttgtatagccagaattttataaatgaatttgcaaaaaatgaacatagatgccttttattcagattttataactatgtctttggaagaaattttttatttaaatttgacattataacttttggatatagaagtcataaaataaatacttaaaatcttttcttaattatggtaagacccattttctgaaatgagaacattttacagtaaaatttgtgatactgtggtattttgagactctcctctttttttaacagcaaatggtttcacagcaacgcattctaattcatgaagattccatgaacctgctaagtctttatacctctccttctttgcccaacattaccttggggcttcccgcagtgccatcccagctcaatgtaagtcattgcacagcatcagccttaatcaacctaagcaatatcttttcacaggggaackctctttcrtgttttatgtatttagactttagaaaaacttgacagagccagcatctccttcactgtttgctatttgctgtgttgttcaaagacattcagtctaatttcaagtcagaattatcctggttcacataatcatatgtaaacataataactaacatttgtataatggtttatagcttttaaaaaaaaagcactttccagatatattattttaatagctccacacagccatcctgtgaaacagagattacagcccacgtttttacagaaggagaagctgagacttggagagtttcaaagcacaagatcacagagccagtaagtggcagacctggaacacaagccagggcagtgctgagagctacagcttcgaaagcacagcagcatatgtttatagaatttattttgtgaatgagtttattttgggaatktaagttactgactctctggtactggcgaatatgtatctggaaaaactctctaagaaaaatattaaactattcccagaagattcaaagtgaatcaattagtttaaaagtcctgacaactgaaataggctctttcgggaagaaagcagtcactgtatcatactgttacatgaaggcctagaagtgattccttgttctggactctttgccttaaaatttcctagtactcagcagagaaaatggaatactagagatctctttgccaaagcagagctaaacttgaaatgttattgtcatactagcagaagatggcaataattattctaggcatattccctgaaacagtgtcaattttagttgtaaaaaatgtgtgggccttatccagaataattcatctctgaaatgttagttaattaaattgtatatatacaggggtcatatgatacattaggtttagagagaaatttattccaactctcatcaccagtttggccaatctttaccttcaagtcttccactgagttgaatgtgtcaagttcacttgtatgttcaacacatagtttcaatgcgtattttaaaatcaacctaagagatattatatctggtattgtcaatagactataatgtcattttatgtggtactgtgttcttataccaatgaggaaaaaacaaaatttggatgttgtcttatatctggggattataaaagaaagcattgaaaatacagaattcagctatgctcttaaaattccacatgaaacatttgtaaatgaaaaacaaaaaaaggaattaggaatgaaactaaaaataaatattcatggataatattttacagttatcactaattaaaaaatatttttccttctctatttcctgtctcttctaatgataagtaaataccaacccaaaaacttcttatgacacatgaatargcattttatttttacttatttttgtatgttctaagccactcctctcaataactcacacatggaccacttttaatgtggtcagggaaaattttttcccaaaggaccaagtactaaagccagaccagttaatgtttcagaggtaatacgatttggtaccattggatgaataaaccaatgtggtttggattaaagtttcatttttctttgcttccattttggtgtggatgaggccatcacaattaatttttcaagtttarcattgctttgccaacgggatttgtagtactccatttctacattgaatactgggaaattttaaggaaaagaggccaggacaargaatcacttctagattaaacattgcattgacttactgtgtgactcagacaaaccacttacctctttgtccttcagtttctccattgctgaaaattgcttcgcctccctggtgcacagcaattttgaaagatgaaacatgagttttgaaaagaaacatgccacataattttgaggtattagagtcctgcttttgtaatagcaaaatgaccaccattcattaaatcctttgaataggataattcattattgctattgatgatataattattattgccttattactgtgttatcatacatttcaagttcttaatagcattttttgtagtttattatacaaaatatctagagtgtcattttcaatatttagagatttgggtatctgttatgaattaatataaaatgtttaaatcaaatttctgcatatttttacctcctttcattgggttattttaagaatttaatttaaaaaattaaacattggacacttacagctctgtgaaattattagaagccatgtagagaaagggtaaattgttccttttgcttgcaactccaaaattacagtccatcttatctccagcttcttaatccccatgatatagtctttgaataaattttacctctccagtatgcctttaacttaaacagtgtataaaatattttagaaatgtactttccacttattaagcctgaaataagcattttttgtttttttattgacatataaaaggtacatatatttgtggtttacaacataatgatttgacatatgtatacatcgtagagtgacttaagctaattaacatatgcattgtctcacatacttattttttatggtgagaacactgaaaatctattctctgagaaattttcacatgtacaatatattgttattaactgtagtcatcatcatgtacaacagatctcttgaatttattctttccacctaaaattgtgtatgtagcatcacttctgattttaattataaaacctttttatgttcaatacaatgacaatattaaattgtcttcagtgctccaaccctatttttattccttcttttttgaactgagttagtttaaaaagtccattttccctgctcagccattgggtaagatggggcttttgttttgggaagctacagcataggaaacttgtctaatgatttagagacccagtgacccacatggatgaaagaggattaacatctttgttatttctcaacacaggcttcgaattcactcaaagaaaagcagaagtgtgagacgcagacgcttaggcaaggtgttcctctgcctgggcagtatggaggcagcatcccggcatcttccagccaccctcatgttactttagagggaaagccwcccaacagcagccaccaggctctcctgcagcatttattattgaaagaacaaatgcgacagcaaaagcttcttgtagctggtaattcattatggcaccatttgcaggtcattttagggttttattttattagtgatccaggataaygtctcttttactcaagaccctgatggagatccacagtgctatacaaaagtttccctgatacctggtaytgtgggaaaggctatcatctttatttattccttcagatccacttggggtaggaggactcacctcatttaacctttattcataccagactaggctgtggtgagtcgtatggtcagatgcgtacctgtccaatgccttgacatttctctcttcccacacctgacctattcttctgttgtttgcctggtagcatcactaattcactaattttcttacagtttataccatgtatctgttttctttggcttcttatcttttcttaaaattgtgtgtgtgtgtatgtgtgtgtgtgtgtgtgtgtgtatacacacatatacatgtattttttttttcaggtggagttcccttacatcctcagtctcccttggcaacaaaagagagaatttcacctggcattagaggtacccacaaattgccccgtcacagacccctgaaccgaacccagtctgcacctttgcctcagagcacgttggctcagctggtcattcaacagcaacaccagcaattcttggagaagcagaagcaataccagcagcagatccacatgaacaaagtaagcctccaagccaagtcaaaatgttctaaccgccagtttggaaattgggtatctcttcactgatatgggtgtctaagaggaatgttgatgggagtcacagcaaaaaggatgtgatcatcctaagcctgctttcttggctcaaggacaccatcacaatatcagtgttttaaccaccattatgttcataagacatttgtagcaaaattgagatgatacattcacaagatctttttatgatcaggtatatattttggtacacaagcccatacgggcatatgtatatggagcctcattttttagtgttgcagaaaaagtttgaggcagacttgaatgtggtgtgttgacatgtcaaaaagtttgtacaggtgatgacagataggccaagattagccagtaaggcacttctcagcaacttgtatgcatctacgttacatttattttgcgaatgccccacttcattccaataagcgtttggagtagtttctcggaaacttgtgatcatttcttcctggaagtcttaatgttgctaaaatagacagcggatgtctgtaccgtaccacatccttaggagctctcctgctgaggcaactacaaagaaacagtgattgcagcataatatcagacaggccagtaaaggattttctatgaattcgtaagcaaaatgatattaaagaacctggtctggacagtttttccactactttttgctgtggtaggcttaaaaaagcaccatcttctcattcctggaaaattcctggaaaatattaaggtcctgagtattaaaattctattcccttgcctttgtgctgtatcatctacaagttatgttacagaggcatgagaggcatgatattgcaaactgatactttgtttactgataaatggatagctaaaacctggcttagtaataactttgttgtactatgatgtaagaaacaaacaaaacaaaacaaaataaactctcatgggcagaggcttaatcatctttctaacggcagtaggggaaagggatcttcatcacttgctggttttatggcaagtgttgctggagtttttctcttcttttggcctccatcgtaacaagggcagagccatgaaggaagcatggattggataccatgcttccgaacagaaagttttccagcctagcccttcgctactctcaaagtagcaaaagtatgtgtgggattggggtgctagagatggggtggctggcagggacaactctctctctaaccttttagtatgcattgcagaccctttctgtgtcattagataatgcctattttattgctgtagcacttctctaaatttagcaaatatttcggtttcatatcaaattattttatatcaaatcagtatcttcaggagagagccaatttccttctctgactaatggcataatactcactgacttgtatgtgactctgcatatgttttctatattatggtagagttaggtttgtttatttgttttgtggcctttcagcacaacttaaaattattaggtattcttgaaaaattgtccactgtttagtgcaagaaatgtatgtgggagggaagattagggatcktatttttttgccatatagtgttttgatctagaattaggtttgtttataaaaccagtattagatagtagatagacttttctgctatgcttggttctatttcctagaaacacatggatgtatatattttactatggtaaagtaggtaaattactcactttgaaattgtgatccacaaatggtttctatgaatacctttaagaatattttggaatacagttttttattaactaattgccactgtttcagattcagatggtgtgctaatatcagaatctttccttttcagtatcaaactcgagattttgacaggcgaatgctaacctcagtcacactggataaaactcagatgaaaagcaggcatttgcattttagcaatgagaaaagcaaatcttatcagagaccttttcccatgtggagctgattcctttgaatctgttaagaattcttcccagaattagaaacaaacctatacttttaggtacatgtttgtacagtggtttgattattaaatcttgtcttaattaggcaaaatgaagaccagaaaacttcaaagtccaaagctgatctttatatgttaacctctctcagcttgggtgtttagatgactcaagcaggtcgccagttggcttttctccaaggatgtattccatatgtttcatcaagttggcatattcacgttgggtattctccagattttgaaaatattttacctgccctcagttgtctaaggggacagagaggaagcttattaaagaaaatatcaaacccatgtcctatcctgaaatattcacaatagaacgcttaagaagtgagtggctactgttcacctgcttccgtgacgtgacaaggatgtttatttcacattgggtcagattcataacttagatgcccaaagctaacatgtttctgtataatatattgctgtatacttgatttaaccatttagaatgcccattagtaagaaatcaccacagaaattttatcatttttccccatttccatggatgaacctttatgaaacccattcatactgaagcgatggtccttactcttgagatacttatagcaggaaatacaggcacacatgaagatgttgacatacaaatgacatatttaaatatatcttcttttatttcctttttatgattcttttttgaggaatttagagaaacaaaaaatgaagtgggaacaagaaaatataagtaggattatttctaaacctgtatcagattaaatatgatgggcttcctggtataaaatttgtagtaatgtgtttgaattactaataatctttagaagaattagaaacaaagctatatagttttaggggcatgggtgatgcaaggattgacttattaaatttgaaagagtttttcatatcttgctattattttaatgtgtttataaaatattcatgttcagtgtaactacataatgtaactgttattaatcatacaaaataatttacctacttgttgccttatactttaatatcatatttgggatatttgtgggatagttgtgtgttctaagattatttgcctcttacagttacggtgtaagtgttcaagggcttagcagaaatatccctggaatgggcttgtatagtatttatactgttatatctgccagtaaataatggggaaagtcagaaaggagagtgctgggctggagaggaaaccctgtgagaatgatttatctctgctcatgagtttgaatattctatttttcactgaaactgttttgagaagtttaatcataaagaaatcaaggcttacaacatttgatcttttgttttctgagacattttacaaatcagaaatgcattaaacaggttctattgctaatatatggtattaatatttttgtgcaatgatgtcattgcacattcatttatatcatttttccccaataccatggaagaaccttttcaaaaaatcaagagtttctttataccagcatcaagggaagactgatgcttttgccagtacacctkgcttttctgattggaggaaaaaagagtttctaaagtagaacttccctcaaatacaaaatatcaaacaaaaagtaataaggtattggtaattttctcctgggcccatttcaagtttaaatattaccacaggattttttttctggtgaaataaaactgtaattgattaaaacagaatacgtaacagttgtttagacatactgatgattttaaagaagtattctaagcactgcctaaaaaataaaagggcaaatctctagtcacttcactatttgaatgatatatagaaaattttcaaaatctctttaggcatttttgttgtgaggtaatttgacatagatctctgccatgccccatccccttgacaacattattctttatttctctgttatagtattaatagaattgcactgattcatgcctagcagtttctattttaactagaatattaatatctttattaatatctgtttttcatattcattccattaaatccataagagcaggaattttaagaaaattcatactttgtttagtagttactttaatgaattattaatctatgtatggatgcgttaaacaaatcattaaatactgtgtgcagacacagttttaagcactaagaaaacaaccttcagtgtcctcatggagcttataggatggggagcaggaagtgaattattgaaataaacagtaatacaggccgggtgcaatggctcatgcctgtaatcccagcactctgggaggccgatgtgggtggataagctgaggtggggagttcgagaccagcctgaccaacatggagaaaccccgtctctactaaaaatacagaaaattagccgggcgtggtggtgcatgcctgtaatcccagttactcaggaggctgaggcaggagaatcgcttgaacccaggaggcagaggttgcagtgagctgagatcctgccatggtgctccaaacctgggccacaagggtgaaactccatctcaaaaaaaaaaaaaaaaaaccagtaatacagtgtgttaagtattaggaaaggagacataagaaagaaaactgatatctttaaggaaataaaatttgagttaattacttctctggattatcttgttcttattatatctcactccctttctttttctttcttgcttgctcgcttgttctcttgctttcttcctttcttatatgctctgtgataaatatcttgtgcattcctatgactggctatcagccaacacttttttaaaaacttacataaatcatgagatgatatcttatatatgccaaggttcggtctagatataagtatttattatatatttattactgtgatacttaggcattttgacatgagtgctattttatcataataaaaatatatctaagacaagaccagtaaatgtgaggtcaagcagatgtactgtgttgcccttattaaaacaggtagatgttatgtttatgttctgacaagcaaggcatgaatataattatgctcaaatgctggatctgagcaaatggagagctttcattagcttttggaagagaatttgactgtttatttgagtagtatctgtattattccttttttgacataattttctaacatgaatgttatatattctctgaaatcctcttgatttatacccattccctgtccccaaccctccatccacagtaacctaagagagtatattccttcatgcttgtggtcacatacaaacatagcatgcatgcctgtgtgtgtgttaatgtgttgccttgtgaagtgtccctgaaggcagttataatgtagaactattttgtgcactattgaaaaaagtataagttttgagaaggagattaattagaagaacaattctttacatgtgtctgtattccaaaagtttacatttttttaaagttatacttcatattctcaaacagatactttatattagctgtattctaatgtaattctatccatggcttacttgtaagcaaattaaatgttaagtataattacacaagggccatttacccacttttgactttttgctgcacctacttcttctagtgtacctcttcctccccttgttttaggcactgtgcatcttttcagcaccttctccatagataccttagggtagggtcatttaaaaactatcagctcacttttatatggaggatctactataagctggactccataccagaattcttacgtctatcttcccttcaaccttaacaactcactcttttttagttcaagaaaattaattttacagggctgaagtagattgagcaaggtggcagggctagtgcagagctgaaatcctaacataggttgtatgacacaaaagcctgtccttaatcatttgtgcttatgattacagtcttattttatgaccaagcaggaaaccggcttttcctaattttatttttgtctaaaagtagaaaattcacagttaaaaacaaggcaaacaaacattaaaaaaaatagggtgatcttatttttcttttgcaccggtttagatttgccacgatgaagaaatcccctttcccagctctgcctcccaacttcacacacattgacctccttcaagttactcacttggcagtctttgcacgtggacctgacggtgagacattcagatatcctgttggattataaggctttccaaacggtgcagagtgaatgcagtacagagccaactacagccaggccacatttcattcctttctcgcatgttgtcacattgccgttgttttagattggacaaacatcttctcacggaagttctgggcaagcctgaagctggaagttaccgacttcatcaggttcaactgaaatgcaaatgttggcatctcatctatgggtggttggaaaatgccttgttttatgttttgaaaaatggatgagtagaaactggaactgggctttcatttaggaaagtaggcattagtgttgtcaggtttaatttctctccatccatttgacagcttgtttccatgcagggtcttttaatcaccaatttaggattacattttgcccattacatggatagtatgtccaaaaactttagcaagcattgaaaggcagtcttaattttataacagtaaaaagcctcctagattatttatctatctatagaggtttataaaagaaactttgacgttacccttaaatcgatgttattctgagataattggcccaatataaatagattcttttaaatacgtagtactaggtctccaaaaaaatccacttatagaataccagcttatatcatcacaaggaattcatatagatgtatttcactatataattacaagttgatggtttctaacatacagaaagtggcttgttgctttattattagatgtgatgaaatcctgtgtttggaaaagaaacaaaatgaccatttcagtggattaatgtgcagcattcataaacattcccagtgctgctttcataacttggagaccaagggaagggacctagacctttccttttcactctgcactgttaatctagtcagagacgcttttattgaatgagaaaaacaatagttggacatgactatgaggtaagaaaacggggggaagaaaaatatctggggaattaaaccacgtgaattgtttgattgatgttgattccaggcagttcaaagggaaagggaagctaaataatttggttgtttcccaaccttgacaagtagtttcatgtgacagaatgaaaaaattaggtcttgctaaggaatttttaatatagttaagtgatttgtagacatgaaaactgccagtgggtagcagtctcttttttttttttttgcatattttggtagcttgcaagttcctggttttagttcttttttcctgtatctttcagctcttcctctaactacttatgaaatctgaggaactacagtgaccctgaaatgtcatctggtctagagtattcctcttcctgcaggcagaattgcatccagagctattctctcatatcttaaatgtactgctgctctcttgctattaacctagttgtatcagctagcaatataaagtcctgcaacagtctccggtcatggaataattgatgatgttccacaaagacttatctattaacaaccattacacttcattctggaaatgaaaataaagaaggcatgttctttcccttgagtggctcaaagacctgtaaacagatcattataatcaaatatgattctatcaaatgcatagctcacatgaattgcaaaatctatcatcttgatagatttttcaagagaagtttctgaggtcttgcacaattatttgttttgcaatattggtcaagatattcaacctttttgtttaataattccataaacagcaaatttttgaggtttacagtgaggattacatgagagaacatatctgaaaatgctttgtaaacatgataagcaccactaaaatcttatacagtatttatattcttccaaatcttagctattgtggacagtgctgtgacaaacataggagtgcagatatctctttgatatactgatttcctttcttttaggtatatgcctagcagtaggattgctggatcatatggtagctctatttttagtttcttgaggaacctccagactgttctccatagtggctgtactaatttacattcccaccaacagcgtacgacggttcccctttctccacgtgctcacctgcattcattacgggtccatcttttggataaaagcattttaactggggtgagatgatgtctcattgtaattttgattttcatttctctgatggttaatgatgttcaacattttttcatatggtgttggccatttgtatgtcttttgagaagtgtccattcatcttttgtccgttttaaaatcagattattagatttttttcctgttgtttgagttccatatatatcctggttattaatctcttgtcagaggggtaatttgcaaatattttctcccatcctgtgggttttagcttcattttgctgattgtttcctttgttggtcactgtgtttaattgggtttgccctgctttccagtttaccaaagtaaggaattgatcaatgggggaaatggcgatgtttatgagttgggagagagtgattcattggtttgagattttgtctattctgagacccattcccaaatcatcaatgattagcaaagaaaataaggatgcctttccacactgtgcctctattttctactcttaaagagaaaaggaggaaaacttgggcagaaagtatactgtcacctgaaggatcctaaagattatcagggaaagaatcctattaggtaatttttaaaaggacataaaattatgcagtgctataaaagaagggaaaactgcttatttttgtcctagttaagaacactgccccaacccctgccaagaaatcttggttaagaattccacactcttgctgaggattgtatgttttgaaaattcagtcttcctctttctacttttgctccctaaatccagtcttccatagcagccagaatgatcatttcaaatgcaaaccaaatcatgttatggttaaaacaccctacttgctccctcttgtttgtaggataaaatccraacacttttacatggcctacaaggctgtcatgatctgattcttgcctcctcccttgccttcatcatctcctcccttccctctctctctaggctccagccacactggccccctctcttatctttgaggaatctccttccacctccaggagctgcgccagccactattttgtgtggaaggctcaacctccacgtcttctcacggtttgattgtgttttggggtctgtctcagctcaaaccttacctgttgagaggggtctttattgcccatccaaacaagagtaaacacaaacacccacctgctcaccccttctttcagctccctatcacttcgagtttcatttttcagttgctaattttctgcctcccctactgtgtgctgggatcttgcttgattgacctttcttttcctaaggcctggcatatagtaaacgctcaataaaaaattattggaagaatgaaaaaatgggtgggcaatgttctcaaactagttggaacaaaccttcagtttccttcccagaagggaacacttattgaagttactgaaatattagcaagttttgagaaccagaggaaaaaaaatttaattgcaggcattgttttggacaatcatttagagttaaaaagatgaagcagcatttattaaaaattcacttcatgctgagattaattttgaacctctttaatattgcttagaaatggtatttttcagtttagacttcaatttgtgtgaataatgaaccaatatttagaaaatctttcttctcttgttatttaattttggttcatctgattacttccctaaaatacacagaagcaaartgacatggagtattattttggcttgaggttggagttctactccaagtagacctctcaatttgaaagccctccaagctctgcatgttgttttttgagaacagttggtccatacctaatctatttgtgaattcaaacagaattttatcattatttttaaatctagtttccttggagcttaagggaaatgttttattttccaaaggaagaatattacatttatttaaaagaaaaaaaaagcaaaaaaaaaaaaaacaaaacaacaacaacaacttctgctattgccattccccaagtacaatctgtcttaaaatctgaggcaaaataagaaagtgatgagttgcattgaagttcactttgcatagtttaataatcatatkcaaacacttgtatttaatggtatgttgacaatgtcagaaaatcagrtgtttatgaggaacagatttattcttacatgatcctgttcttagttgatattttgtatctgaagatatttgttgggatgcaaaggatttctgtgggaaacattaaaattatagaatttaagcatattttatttaaaagtacatatgcttatagagacttatagacttgtatcaagttatataatttacacagaggtgaacttaaagtgctaacatataaacattagtgacagtctttaattattatttartgaatttttcatcatgtgccaatagaatatatgatgttaaacatggaatgtgagattctgaaattaaggagtttgctataattatgacctgagcagggattgataagaattgaagtttagttgtaatccttgaagacttttgaaatttggataaattacgatggtatctggcacacagaacaacatctgtttgagtatatgtaagtgtgtgtgtgttacaaactcagaatggtcataggctgcccgtggcatgcttagtgttcggcccaattgctatacagtagcacagagaatagagagacagcctgacagatgagtatgagcacamacaaaaggcaaaggagaagctgtgcagctgccctcttcttcatctctgctgggttccccactgaagtaactcacctggtgtcagacgagtggcacacggtgtgttttacagatgaggcctcagcagagattcacacaggcttgcacatttatctgtcccacagatgtttcgtcttctgttwtctagccarcaaggcaacagctcgactttgctaggggatcacctccagatgttcaaccaaagagagaccctgccaccccactgagagtaagcagacatctcctcactacatctggggccactcagtgacagtacaaattagaaaagggttagcccataccagctttgcagtggtcatatttgtagttgagaaacacatagaaaacaaattccaaatactcattttcctagtaaatagtcggaaatttacaaatagcacaaagtaacttttataggaaataattcaaatctggcaggcaagaatttctctgtgacttttgtttgtaagttttccttgctgaagttaattgaaaatttttccactgtgacaaatttgactgtttaaacaaaaacagccttagtcagatacctaaaataagaagtgtagattaactccctttctgcatttatattttgcaacactggcaccggatgtcccatttgtcttttttgtattttgtgaatctttacaaagagcatattttattccagagaagatgaaaaacgggtagttattgctcttttagacattgactttgttttgtaacgtaggagaaaaagtgtcaaagcattgttactaagcattaataattttttcagaaacttatgaagctccaattaggtgttatgcaatgtatcaggtactaggatataaaatgatgaaaaacatatagcttatgccctatgagatttatattatagtctgggagataactatattgtaaacaaagatagcgatatgatgccagacaacaataaggactctaaagaaaatatattaatgagataataacagaggtaaaatatgataagaaggagccagtcaggcatgtaaagatttgagggagtagagagagcacggcgtagactcaggccttgtgggcgaacaaactctgcatgtttttattcacggggcaaccagaggccagggtagctggagcatgtgagaaagagagaacaagatcccaactaaggtcggagaagttggtggtgccaggttgtcgaaagtctatggaccatggtaggaggtttgaattttattataagcataataggaagtcagtgggggattctaagcagagaattaatgttacctaaattatattttaaaaatcattattagagctactgtaagagattgtactgttgagggccaagagggcaatcaaggagcccagagtagggcctttgggtagtttagggtgaaaatgatagtatttaggagcacagtagtagcagcagaaatggagaaacatgttaagataaagcctttatttttggaggttgaattgccagggcttgctcacaaattaaatgaaaaagatgagtgatagagaaacaaggataaatcccaaatatttggctcatgcagttgggtaaagctgtttactcaaatgagaaagattgggtgatcaatacaattgggttagatgggaataaaggttatttttgaggtgtttaatgtttatgatgcctattagatattctagatctaagaaaacaagttaagtacgcagctaactatgcaagtttggagctcaggggagagattggaattgctcctattaatccagttgtcatgagaatatatagctatttcagagcaaaatgtggagtagaatggtataaaaagttctaggtttctactctttttttttaaatcaaattcatatcttacaatcttagagatgacttgtcttttttgggcatgagattccttatttaaaaaataaggtttttaagaatgttattaaaagattttcaagtccagcattttatatctatatgttttctactcagaagttactgttttatatcaagaaacatttcttttacaaaccatgaaggaattctgctcttggaaaaagatcacaacgttatttattctggcttttttcttccccatgtttcctttgatagatcagaagtgtagatgaagccaaagaaactgaccggaacaaatagaattatttctgtattgcatatcaaaaattgttatatatactgtcatatgcatatctgtgtcagtgaggttgtaaatactgaccagatttgattaatggactgaacaatgtgatttctgggtacttcagtgacttcacaggtcagatttcagaaggtcttctgttaaaatgtacatataatacgttccatggaaactcaggggtttgttaatattagagattttccttaacttgctaacgatgggaaattatattctagtaaattaacactcagtttgtctggtctttggctgcagtggtaataccagtctcttattttcaaaaatgctatgatttttgtgttatttccctttctaaaatgtttcacctttgctgccacctattaatatcatatttaaatggccactggatttggcattattgcagtcattattgaccttaacaagagattttggttaaatggtgtagaggaaagcctaaagagaaggggaaaagagaaatgaagacagtgaagagcgataactcaagaaattttattgtgaagggaggtatgtaatggtgtggtgggggaggaggtcaaggaaagttttagttaagatggatgatattgctgaaagagtactagtgagagcattccagcagagaggggatctgtgtgatggaggacacagtggataattgcaggagtggaagggatccagagtgtaagccaaggggttgactgagataggagtgcagacatttcactcattgmaacagcaggaggggtggatgggatagcttcataaatgtgctggtagcaggaggctgagtttctcttctgatgcttccattttctcaatgaaatgagaagcaaaggtatcagcagggagtgaggaaaaggggagaatgttagagatttgaagggagaggaggtagtacgagacggtgaaagtaaattaactagaaaagtggaatagggttgctaggcagcactgagaccccattggagggtgtagtcatgaatttggagaacactcagcatgatcgtaatttgtttrtttgtttcctagctcattcagctgcttgggtttggcagagatttagtattgaccaaggttagaagtcttatttgtccagtaaaacccatattgaaaggagcaggagcactgatggtaatataaaggagtggttttcaatgaagtatggagcctagtccagaaaggagggaagtgagcaaatgaaggggacaatatgtagtgagaatgtggcttggaaaacccactagaatgaggaatggttggagtcagactattctgagaaagagccagaagaaaggaatgatgtttgaaattgagatttagagtaatgcagggttactgataaagataggtctcaggtaaggtcataatgttggggaatgaggtcaagtggaggacaaaaccattggaggttaggaggttgagacactgagaggccatgttgtggccagggattaggaaggagaagaatcgcaacagaagagtctttttacttggtgggtgatatttgtggcttcctcttagttattgaatatttcctgtagtgtcagacatccagaagctagctaggttcmwagtcgcgccctccctccccctcaccccccagtaagcagggacttccgacatagcatttcctggacactggctctctggctaatctttcatccggtactcagttcctattccatgaccacacatcccgtatagttcttctgctatcctcaagaggcccttattggcaggatcctttgaacacctctccgggtatctacttgaatccttagtgtcattggtccactagctctactgagcaggttcccagtaacttttcagctgtgctgtgttagtgagagggagagtttctacagctcagtgagcatttgtccagtcttcttacatttggtttctctgatgggctcctgcagcctccttcacctggcttgtatcttttctcagataaatcccttcttcccacaagctcccctcacctgctcttatttgtagtctgaggtatgagtaagggttgcagcactgactgatagtctctgtccctctctctctctgaataatgagcggatgtttgttacccagtgtccttattcctggcatcccagccaaaactasgaatttttctttaatatcttgctcgtttctatgctgttgcatattctttcttaaacagccaattaaatgggttcctacaactttgtagtcaaaatttaggactataatatkgtctcttttctccagaatctcagtagtgtccaaagtactatgtattaaagaaaagaagagctgattagtattcagaattgggacaaaagtcctgcaaatagtttcctaaaatatacttaaagtcatctaaaccatgagtaaatgaatgtcctccttctcccgactgcccagtaacaatggatgttagatggtaggcacaaaggaaattcatattcaaatttcttcattgtgatatgagttttgattggtatatgttttcttagcttgatcttgtctgacttactttggtgatatttaggtcttatatgtgtttttcctaagttatattttatttctctagattcttactcttcacccaaatatattataaattgtatcatctactttaacattatctttcggcatgttcctctggttctcaaactccactagccttttggtgacttagatgcgctggtctccttttccaatccaaagtccccacagactctgccttctaccagaaatgctccccacccttatttccgcccctgcttcccacccctcacacatgtaacttactcctttccatccttcattctttgtgtctaaacctaaatataacacttcctcagcttaactcccttaacaatccccatttccactgctatgccaagcagtatgtgctcttataacaccttgtgtttctttcttcaaagcattttgtcatacttgaaaataggaataagtatttgaagctttctaagacattcactaaaagctccatgagggcagagcagtggctatttttctaatgcttagcatggtgtcttgaacatagttggcactcagtaaatatttgttgaacaaatgaatgaaaattcctaataaatctacctacagtgaaatcaaaggactttgttagtgtgttcagggccatttgaggttgcgtggactgcaggaaagtctataagcctaaagaggctgaggtgtccatctaagtctgagtacttaagtattcacattttaaaacatgtattttgtaattatgtgtgagtgggaggtaagcatgaatttgacaaagaaaaatctgcattcatgtttatggtggtagtattataagtgtgctgctagttacaataattggcatgttgcttacataggcactgacttagcagaaaacttarcaactcttgaaaacacagttcaaggtctgcagatgatttggtccacagggccactgtgaaataaaacaaatgaccagtgtgagacaaaataatcttgagactttttccccatttattgagctttcatgttatgatattttgctattgtttaagttaggcatattgtcagttatcttttaaaatcattaagcagttaattcattgacttctgaaaactaagttcaatctaatttataaaataaataaaatgtctaaataatgatttccaaattaaaaaataatttcctgattcttttctaatatttaatttccatttgagtctgttcataaaacatcttattgttaattttttttaaatcatacacctctttaaagttcagaatatcaaaataaatatttctagttcttacaaatatatataagaagatgctttttcatttgactgtcgtttctctgtataggtacaagaaaattagacaaagactattagcatttgtgttctggctttcatagcgtttaacattcgttgaaaaatgatattgacaacattttttatcaccccctttatcttttgagaaaagtattattcccaggttcaactttcaaaacatgtccttttgaaagtttcagggtttccatggatagtttatttacctttttctacaccatgttctaactgcattaaagagtgatccattaaaaagaaaaaacaatccaacacttaaagaccttattcactgcctactggacccatacaatatggaataatgggactactttagatttagtattactgaggaaacttgttgcctacaagttcattctgaaatttatgttcaatgattagaaatcacagtgtatgagttattagaaatcaaagtgtaatttgcttctctgttaccatgaagaactactgaattttgaacccctgaacactctcttctagctgctttcgaaatctattgaacaactgaagcaaccaggcagtcaccttgaggaagcagaggaagagcttcagggggaccaggcgatgcaggaagacagagcgccctctagtggcaacagcactaggagygacagcagtgcttgtgtggatgacacactgggacaagttggggctgtgaaggtcaaggaggaaccagtggacagtgatgaagatgctcagatccaggaaatggaatctggggagcaggctgcttttatgcaacaggtaataggcaaagatttagctccaggatttgtaattaaagtcattatctgaacatgaaatgcattgyaggtttggtaaatggatatgatttcctatcagtttatatttctctatgatttgagttcagtgtttaaggattctacctaatgcagatatatgtatatatctatatagaggtctttctatatactgatctctatatagatatcaatgtttcattgaaaatccactggtaaggaaatacctgttatactaaaattatgatacataatatctgagcagttaataggctttaaatttatcccaaagcctgctacaccaattacttctaaagaaaacaaattcactgttattttgagtttatgtgttgagatcagtgactgctggatagtctcccagtctgatcaatgaagcattcgattagtttttgattttttgcaacatctagaatttaattttcacatcactgtacataatgtatcatactatagtcttgaacactgttaaaggtagtctgccccttccttcctctctctttttttagttaagtagaaatgttctggtcaccatgccagtagtcctaggttattgtgtaggttgcaattgaacatattaggaatacaggtggttttaaatatatagatgcaaattgcagcactactttaaatattagattatgtctcacatagcactgctcattttacttttattttgtgtaatttgatgacactgtctatcaaaaaagagcaaatgaagcagatgcaaatgttagtgagaagtaatgtgcagcattatggtccaatcagatacaatattgtrtctacaattgcaaaaaacacagtaacaggatgaatattatctgatatcaagtcaaaatcagtttgaaaagaaggtgtatcatattttatattgtcactagaatctcttaagtataattccataatgacatgggcatataccgtaacattctggcaaataacaattagaaaagataggtttaacaaaaaaatttacttgtatataatgcaccttcaggaggactatgtcctttgatgctataaaatacaaacaactttgaaggcaacagaagacactgtttattcaagtcagttctttgtcaggttcctgctgttctcctacagaaaagtgattctgtgagggtgaacaggaaatgccttgtggaaacaggaagtccaagtgattcatgtactgaggaatgtaggaaaaaaaatctgaggatagtgctttactctttctgtttttaaagggcactctatgaattgatttattgtctaagaaaataacaccacaagtagggaaattgttacggaagcttttcactggaacatttccttcatattcccttttgatatgtttaccttgttttataggtttacttttgttaagctagttaaaggttcgttgtattaagacccctttaatatggataatccaaattgacctagaatctttgtgaggttttttctattaaaatatttatatttctaaatccgaggtatttcaaggtgtagtatcctatttcaaaggagatatagcagttttgccaaatgtagacattgttcaactgtatgttattggcacgtgttgtttacattttgctgtgacatttaaaaatatttctttaaaaatgttactgctaaagatacattatccttttttaaaaagtctccattcaaattaaattaacataactagaagttagaaagtttaaaagttttccayataatgaaagtccttctgataatttgacaaatagctataataggaacactccctatcaccaacatattttggttagtatattccttcatattaaaatgactttttgtcagttgttttgcattaaaaatatggcatgcctaagataaaattgtatattttttccatctcataaatattcattttcttcaaagtcttttttcaatctcataaaaaagggatagtgcatcttttaaaatacattttatttggggaggaacatgtggctgagcagacttttgtataatattacttcaaagatatgtaatcacaaacaaaaaaaactattttttataatgtcatttgagagagtttcatcagtacagttggtggacgttaattgtttgaatttgatagtctttgaatttaatcaagaaactacctggaaccagtgaaaaggaaagctggacttaaataatcttagaattaattgataaatgtctcttttaaaatctactgtatttattataatttacacccttgaaggtgatctcttgttttgtgttgtaaatatattgtttgtatgtttcccttcttgccttctgttataagtctcttcctttctcaaataaagttttttttaaaagatcccctttcatacacttggctttgtgtaaacttgccgtatttaatcgaagttgaagcttgcacactagatctcatatatcaaaatacattgccagtctttgttgaaacaagaaaataaagacattttgagcagttacatctaataccattaaaaacaataaattcagcaataatgactttcaactatttacatccaaaattttcaaatagctaacacatgtaaaatttgtttcattttccttttgccagtgtaaactttttcatgatatgttatcatgtttggtatttaaattaaaatgtcaacttctaaatataaaactttatctaaatagatgtcagttcctaactttgctcaacttaaaaaattatttttaaaaagcttaacacaatcccttgaacataacaagcactcaataaatattaaaatgaataatattccaartgtcgtaataattatgtctattacagtgagatcttgaaatacaagtagaaagtgacagcacataaatttaaagagaaaatagtaattaaatgatctccccttatatggtaacaattattataataccagtgtgaggaataggagcctgattcaagtaaaggcaactctgccgtattctaagtcacatcagtattgcattagagtatcaagaaatctggagctataattattgactgttacagaatggattatcattttatagtgccataaatttgagaatacagtcacaattctggaaataccattattgctaattataatttcctgaaatttgcctttgaactataaaattacaggactaacttggtaccagagatcctaaagtatgagttagagaaatcaattaaaaaatggttttatagtgtatatctgatttctgaagtgttatatagggtgagttttaaaacaaagcatcaatccagcattagaaaacttttcattagaaaaaatagttattgccaagtcttgaaataaataatcattagattttttttcttctggaagtaaaaattcaccttctcattggtgaaggtggttgatgaagtgtagactgctacttttcatagatctgagaaagatagtcttctagaaattgttatatattgttttatgctcctttttttcaaaggatgttgaaaaggaattcagacactaaaccttttgttgaaacctagtacttaacagatagatatatatagagtattgtttttaatttggtgtttcattgtgttkttttcaataattgaagtgtacaattttgaatcgctgtaatatgtataaattgtaggtgtgtgattgaaggtttacaatgataaatagtttgaggtctccaattgtaactgattatatcaggaacttggagatacaaaagaaggagtttgagactattattccctttattattgatcattgcttcatctctgttttaagaagaaaatattgaaggcaatcaaagaatttgagcaaacacaaaggaaatttggaatgtgacttttcagtcatgccaacaacatatctatgtaggcttaaaaacgtttatattcttgttgttacatstaattttataataacatctttgaggctataaactgtgtttaggcaatgcaacttttggggatcattttgatttagaaaaagatgtttacttttatctattacaaacacacagtgcgcaagcacttcatatctattagctcatttggtcctcacaataacctgatgaaggaggtattattatcatcccactgtagagatgagagcactgcaaaagagaaattaaagatttaggaggtctagctttaatttgaacctaggcactttggcaccagagtccctgttctcaacctttaccattgtgctgtgttggtgcaacgattctttatatctgcccgatatgcttacttctgtccaatttattcarttgtttctctctctctcctcattagcatttaccaaactgtcttgatcaataatctttttttaatagcttctataaattgtgagattagtgattagtactcttttttttttttctaattctaatgagggttagggttagatgaaggttctaatcctgcacacattttattcaaccatttttaatcgtgaaaatctgtagccttcttttttctgaccatagccggtcctaggagggactgaaacagagtggccacacttggttaacttttaggggaaggagaaaggatttcagcaggttcagagctctcctttacttcttagcttcattcccaaactaacgcaaagaaagtccagtttctaagccatcaggacgctgccttttacagactttttaaacctatcaaggacacgcttgataataattttgacttaagtagtctgtataaaacgttgtggaagggaaaaatagagacagttgtcacgttctagacctcctaagtggtattctaatagaaagatgcataacaatcctctcgagggaaacaggttctgaccacacccctagaggttctgagtctgttgttctgactggttgctcagtcatctacctttttcaagccttttgaagagtccgattcagaaataatgttttggagatggccaggtgccctaaccacttcctgaaatctggcctgatttttaatagcttttacctaagttcctcagattctctgattcatagttttcaaaatatcttgtctcctatttttgtatattgttctcggcttcttctgcattttaactcaagtataggcaattctcactatatttactggaattactccaatacgttttagaatattcatggtgctgtgcagccatcactagtatctaattccaaaacacttccattaaccccaactcaaaaaaaaatcttgtaccaactaagcagtcactcccactccacgctcgttcttgcccctgacaaccactcatctgctttatatctctgtggatttgcctattgtggatatttcatataaatgaagtcatgcattatgtggccttttgtgcctggcttctttccttatgcagaagattttcagggttcatccacrgcatcagtacttcattccttcttatggctgagtaatattcccttgtatggctatacaacattttgcttattcattcatcagttgaacacacagttttcacttttttgtctattatgaataatgctgctgtgatcattcgtgtacaaggcttttgtgagaagatatattttcatttctcctgggtatatatctaggagtgaaatttctgggtaatatggtaactgtttaacttttcgaggaactgtcaacctgttttccatgtagctgaactattttactttcctgctagcaatgtatgagggttccagttcctccacatcttctccatttgttatttcccctgccttattgatggtagccatcctagtgagtatgcagtgctatcattgttgctttgatttatatttcattaatgactaatgatgttgagcatctttttatttgcttattggccatttctataacttcattaggagcaacatctagtcaagtcctttgcccattttctagttggcttgcttgtctttttgttgttgagttgtaagtgcttttagatatattttgtgtagtagacctttatcgggtatataagttgcaaatattttctcctattctgtcagttttcttttcattttcttaagtgttctttgatgcacaaaagttttgaattttgctgaagtccagtttatctatttttccttttgctgcttgtgctcttggtatcatattttaaaaactgtaacctagtccagggttataaagatttacacttacgttgccttcttagagtttcattaatataaatttagcacttaacattaggtctttgatccattttgtgtcatacacattgtttttaaatattcttctrtgcatttaaattattttcaaagagatatgaacttcatgattattggacttcattttctcatactttatcttcattttccttattatatgagttgatgcaaaagtaattgcggtttttgcaattactagttgcaattactagttgattttggtcttgcttttctgatatttctgtggctgacccttgttgctttctaacttttgatactgttacttttttcttcccaaaatatcactgaaatgttacaatcttgatgtttattattcctttttttctggtgctctttaaaaattaaatcaattatttttcttcatgaatattacttttaaaatcctaccctcgtcactcagttttactaattacagttgaattttatgttgaagccaggtgtggaaggatgtctgtagacctagatacctgggaggttagggcaggaggattgttgagcccacgagtttgaggctacattgagctatgatcatgccacggtgctgtagcctgagtgacaaaacaacagcatgtctttaaaaaaattatgtcgaactratgttcatgtcttagctttgatcttcatgcctctgttgacagaatttctggagaaagaaccctaaatttgctctgtccaaactagtagccacatgtacctattgaacgtttaaatgtggttggcaagaattgaggtacagcctaagtagaaaatgcacagcagatttcaaagatatagtacaaaaagtttattaatattccatgtctattgattacatgttgaaataatattttaaatatatattaagtcatataacatcattaaaattaatcttacctgttttactttttaaatgtggctattcgaaaagaatatacatggtttgcatttgtgacycacatatttttatttgtatttatgtttctgctttagatcgtcttcatctcattttgtattttgttaattgatagatctcatcacatcaatttgaaaatagatgggctataaaacttgaacagatgaatttttgctcttgccagtatctttctgttgctcttaattaacatagaggcataaaatgttagtgttagcagagatmtgaggcatctgaatggtttaagggtttaaagatccttctcctttaccttaaagrcaaccgaaagtctgccaaatgttttattaccaatattagttgtaaggagaattcacttaccgctccattctcatctcaaagttagtaaattcatgcataatgtgtgctggtttttcctgcttttcctttttgctgttgttgttgttgatgagaccaccatttagacagtgggatagatgatcttgtagtcatctttgattatcttcattcctttatctcctataggcagttggtcctcctgtttctgatttcacatcatcatatttctttacttcaccttcagctttgctttctccagctactagtgaacagtaaaacaaatccatggtgctctcattgcaatagcccccttttacatcagtgtgatatttatactacttcaattaacttactgtaaaatgacaataccattttcccattttctgtggtcaacctacagtaattgctttctaatatttcacttaaatgatatcagagagctacagtcttcataattcaacctttatactctaaccaggcactcacttctgccatatgccatctgtgatttctctagcccttctgaactccccaacttgaaatcagttccatagtttcccatgtaattcttatttatcattatctgtgtggcattatgtctttttggtttttgaggtcagggaaaatgtactctattgtgttcatcattgttcctagagccactcagggaacctatgaaatgttcagctgaactttattttaatggtttttgttttacattgttcttattcagatgtaaatggtwaaaggcatttycttccatactatgattttattctcacttttattttcgatgtgaaatgtrgagtcatattttacttgatggrctatttcttgtcctcagtgtcctccctagtaatatattttttaaactggctttagtaaaaatagctactatttttcattttcagcccatggtaaatgatggaaatatttttcttgatgaatttattatttaacagtactcacaccatattaatttttataatttatatttgtatatgaattattgactatgacttctaatatctagcatacatttttagataaaaatataatatctagattaatttgaatgacctctttatagtattaatttttctatttccacgtattctatagataattttttaaagtgagagcttggaaagaagacaaaatgattcatattaatctttcttagagagtgaatcagcctcctccttgtgcatatttaaagaaaacttactaaatgtggaaattgatgtgttgttttgactaggtatgcatcaaaccctatgtatgcatcaaaaacagtggcattttgcatcgtctttgagatctatgcatggaactgcctcgtacggtaatattgattttatagttaggctgcaggagttgcaactccaacttccccacctactagcaactccatgtgaagtaaattaccgaattctgccaagcctctgtttactggtttgttaaatgtggtcaggaattctaaatttttctgttaaggaattgtcagctttaaatgtgttaacatgtttaaatagtgtaatgagtactagcataatgggtacacagtaaaaattagctattgttatgaaaagtagcattaatatatcttggaactttagtaactttgttctccttggtaggagctgaccttacactcaatatcaatctttaataatgaataattttctcttctgtaatcaaaaaaaattatagtacrgtacttcccacctttttcatgtcctagcacacatagaaaatggcaatatgtatacggcccaggtcactgcaggaggctgctcagcctctcctccctgccccaagagttgagaaccgtctagggttgattcagctgcagccctttcatgacttacagggaagttctcaggctggaatgttctttgggagaccctgtgagtacattactcctcttcttcctctccactgccttttcttctgtctcctctcacctcccataaaaagaatcctggattttttttcaccagatttcaactaatgattcactaattttaaaacaactctaggtgtgaatgattaacatgatcattgttccgaaggatgtattaagaatatgtgttgatcacggaggatctttggataagctatgtctgtgcccaggtctcctctaactttaattctcaccctattatcagcaccaaaaccatcaatcagaaagcaaaactcagaaaattggcattgtctagtagcctatagggggttctcttgtcatatttgcactggactctgcctttctttcttatttttatttttatagccagtcaaatttagcagtgcggggttgtatatggactctttctttggaatcagcatgaaataaagaatgcaaagatttttctgtctctgctttttaacaaatgttctgggaaacttcccccctcccccacctactatctctagttaggtaaatgctcaaagaacttagaatgggaaatcttgcaatgatttcttgatcttaagtaatttgactgcataattttgcatagccatttgtcctctctctattaccttcttttaacatggtgaagaataagtctactttacactatatttttagcatcttagatatattttggtcatgaagatggtgctatcaaatccttttttaaaaaacttaaactttttgaattatagcacatttaatgtttatttttctactgtaaattataaattatttgacttttgcttaattatttcaattgtctgacaaactcataaaaatatccaacttggttcctttattttatattttctttatcacctacaaatcttaaaatgtatatattttatgtctttatatgtttacagtggttagttgtatctcattataacctttttctggatatggaagcagataatattttcttccttaaaagggactctcttagggattaaaaaaattctaatttttaatgtcctggggtttttggcatgctgtttaaattaaaattttaaaatgatatttttgcttttgtttacacacaacttcctaaatcttagtgatttttagtctactttttgaactataatatccatacaaactccacttgatatatatacatagagtttaataaactttgagaaatatatatgccactatctagatagagaatatttatgtcattccagagaattccctcctgccctctttatactcagactcacatcctcactctcctcccagccccagtcaactattgatctgttattctgacactatatattagtttttatttttctagaagttcatttaggtgaatcatataaaaaagagtttgtgatattttcagtctgaattttttttcaatcagaaaatgcttctgagatccttccatgtatgtaccagtgatatggtcctgtttattgctgaatagttagccactgtacagatatgccacaatttgtttatgtatttgtctattgatggaaatgtaggttattttcaggtgtgagtaattatgaatgaaactaccatgaatatcttaaacaagtttctgtagaaatttattttatttcgtttgagtaattacttaggagtgaaaatgagttgtacactaagtataggtttaactttataggaagctgccaaattatttgtaattaattattgtttgacattctcatcaacaatgtatgagtttctattactctgcgttcttgtttacacttgatattgtcgggtttttctaactgtatgcagctaatgactgcattaggtggctcagtttttaaattgaggcatgtctttttattgttggttatcaaattatatattttggatacaatctatttctacatatgtatgttacaaataatttcacctactttgtcattggccttccattttgaagagcagaatatttaagcactaacactagcacttgatgtgttccattctatcaatttgttcttctatggttagtgctttagtgtcctttcaagaatgatttgttttcctgctttcttcctccagtttaaacatttaaatgaaagagcaattttgagttaatttttatatgatgtgaagacaggttgagtttcattatcttacaggattcgatttttcagcacctctttttttgaaaagattattcttgctcctttgaattattctggtctatttgttagaaatcaattgaacatataaatgttagcagatttctgagctctttattttattccattgatctctgtctttacaccaataccacagaatcttgattacggttgctatttagtaactcttaacattaagtagtttatttttatctgcttgtttgtaagattttttggttaatactagtttttagcaaattgattatgatgtcccttaatgtggttttctctgtgtacatccttctttggttcactgagcttcttatatctgtgggtttgcactttttaaaagtttagaaaatgtcaagtgttatttcatctgatatttttcctgctaattattttctctctctttcttttgggactccagttacacatagagtagactgcttgatactgtctcacgtatcaagtttccatatttttttcttcatgttttcttctgtacattttccattgctgtacacatcttttcttcctagtggatgaacttctgttaatcacatccagtaaatttttaatttaagatctggaggttttcacatctagaaatatagatatgttttccatttgtctctgcaacatattcacatttttctttaaatccttgagtgtatttttgtttactttaaagtccttttctgccattttggggtctgctactactgcttaatttttctcttgaatatggttcatattttcctgttctgtttaatgtctagtaaatttccattcaatgttagacaatttaaatttgctgtctttctttaaagaatgttcacttgaaacattcaaggcttgtgttaaagttttgtttgtgcaagtctatcataacctttacactcaacttggtttctctcttgctcmctaatttgtgagttctctggagcatttaacaggggtggatgacaccagggaataatcaatcttagcctaggaccctggtgcaggaatgaagatggagagaaaggattggatttagtaaagatctgaaaaaataaatccagctattctggggggaatgagctgcttcaactaattcttagtcctgtattcactttagaagctagtcacttactgggtcctaccaagtcagttctccagtgtggcttggtcattttcaagcaggctttgaatttcttggattttggtactctttacattcaaatattaactttaaaggcagatatgagggaacaaccattaacaattgcctatacatatacagacaaacacagactgaatggacatttttacccaagttttttggaggacctgtgcatcctacaattacattggttaaactatgtgaaaacaataatacaatctagtttaaattttttttctaatctccatttaaagaattagactttctctttcttccttccctcccaccctctctccctttcttttcttttctttcttttctttcctttctttctttcttcctttcttcctttctttctttttcttttcatctttctttccctctttctctttcttctctctctccgtctctttctttctctctctttccttttcttctctgagtaacattgatcctactaaatttattagaccgtgttctgttaattcagttactctttaatatagtaagaaataatatgtcttatgaaaaattttaattccagtatgaagcatagataatggactatttataacatctaaatactaggtaacgtaagtgtaatttttattttaaaaattattatttacattttgtatattatattttaatgcttctatttaaagaggtaagccatggatgttctgcaatgattctacattttctatgtctctaagttaaaagtgccttgcagtcttctaatttgggatccctgttaagcagttttcttgcatttagttttccaccacagtgcttagttcctggtttctttatccaggatgacaattactatggcatagttcatgttctttgcattagaaatcagtgccaatataaaccatgactgataaaaatgaatgggacctacgaacccaggggaacttttctagaaacatgaaagtatggatatgtttaaaatgttcttgaccaaaagcctagaactgcagtggcaaacttagagaaaattgtgccattggcctaaaaattgtggggagcctactaggagagttttctcaaaagattccaaaggcttttatgccttttaaaacatttatctcttcatcttcagttgcgtaatgaggaggaagaaattaaaagtggtggaaagtgagcaatagattttattttaactttgattcagaactattcaggttttgattttagttggtatagaaatgtgttcttaaagcaatcagaatattagctgaagttagtgttagtgaaccttgatgggcagaggtgtttctttttcatcctctttaattaccatggacttttagacggcccctaaagtgaatttggaagttttcaacatttggcattcaagttcaggcccagggaggttatgtggatgtataacttctgattcttggatggtgggttgatactgtatattttttaatggttacacttttccttgactagtataaaagatttactgttacagtttgtgtgtggccaggcagtggcatatggaaaagctgtttcctgctatttaatttaattagcccaatcacgtgccagccttcgggcatgtcactctggacctctgaggctctttgtctgtcaaggagatgaacaatatcttggctttgtttggttgcttgggatgctgaagatacaaaccactgaaattttgactgtttgtttaaccaaatctttgcatttttaccatttggctttgattttgttttacaaaaaaggatgacatttggccttggggaagtgaaaaagaaatattgagtagaygaagaagagctgttgctttctatggcttaatacaggattgagatgattatcattttataatcaggaagttttagttttctactattttgttggtaaaaactgaggacaattttcattgcatcactttagccctaaacttagctgacaaactgtcattctaattcaagccttcttctttggttcatgtgtgtatttttgtgtgattttcttcatcttgccaaatctcgaaatctttcagtgaattcattgttgaaaaagaaaatattttgtttcgtttttgaattagaatattccagtttggtcttgttttcataaaaaagatggtgattaatacatttaggcaccttcagaattgttctcaatattttagcctttcttttaaagttaaagtacttttaaaacttttttcttttatagtcaatatgttcagtttttaaaaattatctttaacaatatttgttattattatatttctttagtttcaaagctttaaaattaataaagaacatttgaagaaaaacagaagatttgaaaatatatgctacagtataggaacttgatttgcaataaggacttctgcctaaatttccagcagaattaacagcaacttccatgagtcaaagttacttgtcccaggtgatcaatttctttgaacatccagattttaaaattagttgtcccagatttgaggttcttaaccaattatagatacatgcacagtttagaacttcaagaagatgtgcccatggacttaatcctgcactaagaaagttagattaagtcacacagagcatccattccatatgagctactgtcccaggtgccaagatatcgccccaccctctgacatctcttggcctttggagtaacccataggacctatactgaataaatgacaatctgtcccaaagaaaatatcctttgtctaacgctaatagaaccattgcttctcagtagattgggattttttaagcaaattattatctatttcattttgataaactttgcaagaaaagcccttacctctaattgcatttttaaatttagaataaaaggttaaatttattaagaaaaggaaatgaaaacctaaaaatttaaattctctttaccaacacaattctcagaacataatttacattcacaatacagacatttaaaatgaccttataatatagtttccacatgcaaagtataaatcttacttacaaacctatgatctgcatagattttgcattttgtttaagggcaagtaaacaatcaataacaaagagaacattgtgctttttctcttctaatgctttctrtcatcatttcttctgtgtaattgtacttaaaacttcaatcattgtatccattttgggattcattattgtaatttatagttctttgtgtatgattaatttttcatttttattttccttatatgtatagagcgtgatatttctgagggtacacacatgcctacacacattcacactcactctacatattgattttagaataaagttgtatccatccaagaaaatttgttttgctggtaacttttaaagaatgaatatatttttaatattgggaaacacccatgttctctaaataaaatatagccatggcagaaatgcagtccttttttttataaaggtcttttttttcactattgatgttttgttgaaaatgttataaagtataacaagactaaaggttgaaatcaaattaatcgtgaggtgacagttaattcagaaatagagatcttaaaaattttctgggaggtggaggtgggtggatcatttgaggtcaggagttcgagaccagcctggccaacgtggtgaaaccctgtctaataaaaatacaaaaattagctgggcatggtggtgggcgcctgtgatcccagctacttgggaggctgaggcaggagaattgcatgaacctaggaagcggaggttgcagtgaactgatatcataccattacactccagcctgggagatagagggagactctgcctcaacaacaacaaaaaaaatttaaagacaatttatttgttagccaaacataaggccctagaatataggtattaaaatggtacaaccttgtttctgctagaaaatgtaatccttgtgaaattctgaacttttcttttttttacaaaaaacgaataacaatagtgaaagtaattgtgcaatttcaaatagagatttagaaacagcaaggtgtatagaaaaagtccttataattaaacttacaaattaatttggcttgtagtaaacattactccaaattttatttgcacattgtcctaaaattctaaatgaaaaaaataaaaaatacagtgtcgtttgtgccactatggtcaaaatatatataaagcacaaaacctgcaccagtcttgatcaagatcttccagcttctaagttgcagaactgtgatcaaaacctacatccagttccatgttctttccattaaacatcgctacttctgagcagaacccacagttcagcaaagggtttgacatcttgtccctggttcttctaaagactgaaagtaggaaggatctttacttccctacactacagtttcatgacctctgttatccactgggttactttgaggaacagcttccgctgataattgtaatagtttattttttgtttgttttatgataatggacaaaatttattgaagcgcttgcttacttcttataggtatattgagtgagctgttgtattttttcactcaaaatggaaagatagtgctggcagaaaccaatctttacattgttttatttcaactctgcttgttaacaaactggaggcatcaaagtctgagatattgggagttgagttttctacgtgtaatttctatgatatgcttccatttttcaaacttttttaattttcaagttttatttactctaaaataaaactaagaatacttaactcatgaagaccagaaaacaatatttgatccatcttactttttaaaatcaaaactatcatgttagaccaggcgcagtggctcacaccaataatcccagccctttgggaggacaaaatgagctgatcacttgagcccaggagttcaagaccagcctaagtagcatggcaaaatcccatctctacaaaaaaatacaagaataagccatgtgtgatggtgcatgcctgtagtcccatctacttcagaggctgaggtaggagagtcacttgagcctggaggcggagattgcagtgaacctatcatcccactgcactccagcctggcaacagagccagaccctatctcaaaaaaaaaaaagtaagaatatttaactcatgaggaccagaaaacaatatttgatccattttactgacaacaaaaactttcttttcatcaaaactatcctgttaggccaggtgcagtggctcacacctacaatcccagcactttgggaggacaaggtgggcagattgcttgagcccaggagttcaagaccaacctgaggtgcaacaactcacaaacaaacaaacaaacaaacaaacaaacaataaaactatactgaaaaggctttaatacaccaactgataacttttagatggtttaaaggcrtcttctgatgaactgtgtcctaatgagtgtgaatggatacctttgagcaaggtacccagatttaaaatgacatatctcttaattttaaacgtaagatcaaggtcctaaaatttgatatagactaattattcttcaacagcttgggaactttatttcctaccccaagagacagttggtttatgaagtaaccccctacacacaatatatatacacatatatttatatgtatatgtatatttatgagtgaacttttttctttgcacacttttcctaatggtgtcatggaaaactcccctccacctaagttatgttctaaagccaatcttctagttttttatcacatcatttctcttgattttaaacatttgaaatttgaaggaaaatggtttcttctgtaacatgatcctctctattcagttttatgtggttttcttttccttgttacttttcctcctcaaggtcctcccacttttttgttgttaaataaaattcgtctgaatctctctttgaagataatttatggagagaaactgtcctccaccctcactgtggcttaccacaacctctagaaaggttagttggagtacactgaaataaaaaaagactgtcaaacagcagttctctagctatggaatctactggtgttttgctggaaagctcataaaatgaagtgtcattatgcactgtgctataccatccattgtgtgttctaactatatcactcccttttccacttacccatgggaagcagcttacccaaccagtctggcctatgtgatggagaagcaaagatctgaagagccagttttttttttgttcttggccagctatacaatttctaggtgttctatgcctcagtttcctcatttgttaattgaaagtgttaatcctgatcttcatcgaaagactatggtttgctcacccatgctgacatgtaaagatgacatatagccacagctttcttgacagttatcaggaagacagaccaatattgaatgaccatcttagttttaaaaattatttttcttttatgttcatataatttcctttaaaattctaactagtagaaaaaagatttgttsagtgtttaagaaaatgtcaagtgaatgctgatttactatttttgaactagaattggcaaatagatttcctcctaaggggggtggggtgagatggaagaaacattctatgcgacagagtttttgatattcctcaggaatgaaaataacctaactaaattagtcataaaatatatgcagaaatagcgtgtgccagtatttaaagtttaaacactattaaaaatagtgtagaatggcaaaattttattgttggtaggaatgttagataatgacaacaataacaacaatgaaaggtagtagggattgaaagctaattaattgccaaacaccatacccagtaatttatgtttatcatttaatcaccatttcatatttaccaaagaaaaaatgaagacttcagtgtggtaaagcagaagtcatacatctgaactatgatagagctcagattccatccctgatccatatccagaaaggttgagaggctggcttggagtctcagtcaatttgtggtgatacagtaacagacactcaggtctgactcataaactattcaatgtaacttcaaaatacagtactttcaacatcaaatcagaaaagccatttgctactatgctaacttttcaaccaagtcttctttactccctccaattattttcatggtaatgttccagcacttgtagaaagcaaaggcaaagatggaatgtgaaaaactcctatcagtcaggaagtcactgtatggatggcttcacagttgtggccctgcttttttccttcatactaaacacatgtcttagcatttttaattcttctattcatctctagttcataaagcttacatcttgtggtcatggcttggaagactacaaatgtcatttatgaaatccccaactcttccattcttatattacatacttgatgtggaatttgccttatgtattaatgttttaaagtctaaatatatattcattcccttcacctcttagaatatctagagaaacacgaatttagatatatagcctggcataaattcttcacaaatggctgaagtctctttaacctacctggtggattctgaaattttaactctgtcaacatttatacaaaactttttcctcttctccgtacatagttatagtaaaacactatgtttaaaagaatggttggaatcctctcaccttcatatgtaaaaatcctcataaaataattcaactaatctaacataaascttcatttctttaattgcttatcacacatcagaatgtgcaaggcattattttaaatattggacatggtcccgcctggctccaataagcttataacctgataagaagagggtaaattatacatatataaaattattagataaaagatgttaggtactacatgataggaacagatacagtatgctttgagagttcatatttttataattgtttaaagtctgaattttccaagtaccatgtgctttacataaatataaatagttaataaacatttatgctttctaatcctatcaaaattcttagtgtagcttcttaatgttatttctgtatatacacatttcctagggcaacacattttccagcataggcaataagctgttcaatatgtaacataagctagtaaatagtacaaccgatttaagtaggtaccatttaaataaatcttctactcaatgcactggccatgccagatccctttatgtgtatttgcttgcaaaaccacaaactagtttactmttcttgaaataacagatattcaaaggtgtatgatataatttacaacaatatttttatgttataattgatactatcatagaaccctcattgatgggaaataaatgtctatattgggataaataacatctatacttttcaaaagtccttcagtgaattttgcattcttttatttttcacatctccgggtatagtagtagatgcaggacatcattattttggcaatattcaggtatctttgatattcactatggaataaattatttcaacatatcgagaacagatccaaggaggtgacctcaaagacctgaaggttaattaatggactaggctatcctgactcaaaatgaataggaattcagaaagggaagaagagggaaagctgtgtatttctgcagggattcatgactagttagatggacatattttattatgttttttcacaagggaaacatttttcttcattgtatattgaggtgtggtctcttataataaagattgttttagtctttacccaataaattttccacagtatctggtataaactctggctagataactttttactttatagaatttttccctaatgtaatgtgtgaaggagtgaggtagctatcagatttccatttataagctaactgaaaacatggaaactccacaaacagcccatataacctgaaaattgagcaaaatgactatatayacacacacacacttatatatgagctatgtctatatgtgtgtgtattatttagaatactatttwtctatacatcagtttgttctactccattactcttttagttttcaacaagtggaataaaaaataggatttcaaaagcaatatcataaagaataatattctcagagagcaagaaatgatggaggaaaaatgctgttttataaagctcagtctgtttagtctagccttagtttgactgctgacaccgggaatgcatttctaaacttctaaatgatgaaggttccatttctagtatatttatatacaaattttatgaataatgtgcaaatttacaaaagatgatttgctttactccaattccagtgacattttccaaccaattattttagaaatatttttacatatgccctctatattgctgataaaagctgactcctgaaggttacatgtttattctctaatagttttcattttccaattttgatactgacttctgggttcacttatagttggcacatcctttttttcctgtttacttctttgtaaaccttcttccaatacacaattacccaccccacatgtcttttcaaataggagataattggttagacaagtagatcctactgtttccaccgaaaaactagaagaagcacacattcacgggaaatgtctttaagtttatctttaaattggagcagggcagaggtcactagctgaaaggaagtcaaaatgacaaggaccctaatggttacagagaaaggttaagacaagtaaatatctttccatgagacacttgggctgttgttagctacctggcaaaaaccattttccactgaaataagttaaaatatcactaacttagaaaaagtaaaggaaagacagtttaacttaatggaagttttaattatagtctactttaaaagtgatttaactttattgcttctgaacctgtattctgtcacataaattaaaactaccaaatgggagcagataaattaaaaatacagtttacaaagacttacgttgaaaaataacttacaaacatacacaccattaaaacattaaaatgggttgctagagactggcctaaccttggagaagaaatcctggatttggatttgggggagctttcttttctaaacattattgcaacttccaaatgaatacattatttccctcccaccgtaggataaataatgagtttaaactaagacatgggagacagagagagattttaggtactacagccttccttacaattttcaaaattcagaaacgcccattggcttttctagtaggatatggctaagaaacaatgtcacaagggtcaatggtaattgctgcagaggatctagtctgagaggaatgatttaaaggcaaagaggaagaaaaatgattataaccaaacagtccctttaggaatgttttaggaatatattaaaagttctcttaatcaagaaatttctcttaaccagatagtgcctgatattcttggagattttcaaactaaaggtaaagttttgttggcttacggttttacagcaatgttgtttctaactggttttatgcaaccacagtagcaacaaggcctagtgcttagcatgatggatttatggtccattttgggcttacggccattaggatcactagcagcctagtttccctttgatttaaacaggatatcattggtttggttggtggcatatttcttctgtggctatggttggcttaaaataagcatttttggtgtacttgtcaactgtatctagggagagggaataatccaaattgtccaaattttattaagaaaagaaatcacattcttgcatatatctataagtcaggacacaaattccattatgatgtgtagaaggtattcttccatgggtaattttatgccttaaatcaagatttattgacatcaagcagtggtgtttcatcaaatggcctaagcatccttgggaaaggaacagaggcggtgactgtagaatgaggcacaaagtttgttgagcagtcccactggttcatttccagacagcatattgctgcttgtctctcaaccctttttgcaagagccccctcatctgatggtaactaaagaggtttttatccatattttatattcctgagtgttagatgtgaactttgagtagataaagtgaagagatattactggttataatacgccaagatgcaacgactgcaatttgcatttatgaaactaaaatatttgtaaattatatcccataactgttcataggttatatgataggtgtatacgtatattttggttttgttttggcagaggctggtatttttaaactttgactctcctttgcagagattgatgctgaaaaggtgtctgtgagcataacttttttagccaatccatcttttgtgggacaacaatccctgccagacatttctttaatgtttggcacaatctatgtccctgtttcttttctggaattagagctctttttttattctttctgctgttctgaaaatgagaagcagccgcctttctattttcaccagggtcaaattgctaaagtaccatttattttttttaaatgtggctatagtacacattgtgcatgaatttattcatagaaaagagaagtctaattattttgagagaaaatcctctcgaaatttgaataaagacaggacaaagtaaccaattttgcaaacaagacgtacggcatgcaactagcacattttggcattatgccttttttctgtacaatattaaaagatatattagatttgataatagagttgcttaatgtcctttatggaatttgcctctcctcactcagaaacaaaagcatatttctgtttgatcatataccttgcgattatagttttccactaagggattgtagggaaaacaaaaaaaactaatattatcagatgtctgtttaatgtatatttataaataacttctgtggaattcttctgtcttggaaaattctgagcaaaatgctaattttatttgctttgcagtatttacacatgcatagaaggtcttttcttaactctgaatgaaacccatctaattaatgatgaagaaaaagtgtctgagacggtgcattcaggagataggagacatggcaaaccactgagagcaatttgtgcactcaagtttatgttctgcataagagggttacctgctacttcctaacaaaaaaattatttgcaatttaagtatttaacatgtcctcattaatgctaacagacaataatccagaagtttaaatatgttttaccaaaacttttctgagaggttggtgggtcactttgtattgctctttctgatcttatattcatttaagtaccaaagagtagagggactttmgtaagcagtataaaactaaattatatgttgatttttccgtgggctgttaatgtcttgttaccgtgaggtggaaagggctgcttcgtggtttctggcttggtaatatttggcttgtaggtaaaggggaagaaaacacagaccacctgtaacatgaatgttgacctccaattgctctttaaccaaaattcctttcagttatttccaaatttatctttgattaattttaacatttatgcattcttcaccctactctgtgtgtcataaatggcagtcctttagaatggataatgttctaaataaaattaacctgtgtgtaatttttttccacaatagatagaattcaagctaacatagactgcagtggtcaaagaggaaaccatcaagattgccaatgtggggtagcccatattgatcccaatcaggtcatatgaccttggcataccagagaagtcactaaagagtgtcaacaaaagagaacagtctgtgtaacacaacataaagaaaagagggcagaccctgcagtgatcacatcttgtgtttgagacctgccttggccacttacaagtctcaagttcctcatcaatgagatggagttaataatacctgtctcctggggtaaatggtgaatgagtctcagaaaagacagcatatttcagccccattcacagagttaaggcttaatgtgatagctacagattggaaaggaatgaaccattactcttcttaagaatactcagaaggaaaaagcctggatgacttaagagaaaactttccaaattgtgttttaaaacatcagtccagggagatgttctcttgtctgatgagttttgtaagcttcacattctatgtaagctttgtggagacacccggagtactttagcaaactggtggctctgagaaatcctgcagcacagcaacttatttacattattgatcgcaacattaaaaaaatgaccatgacatttttaaaatgttacttttttatggaacaaactttttgaaacactgacctaggacataggtaataagcttttaactcctcatatctcagactttaggtaacaaaactgaagtgaactgtaacttaaaacaaaccgtctttcctttttctgtgcatttgagaaaaagaagatttggatgtaaatctatttatctcagactaagtttggggtttcttgttaatttctgtttaaagagattttgtgggccacgcaaactaatggagatctagttagtatataatactttctcacatcatgtggctaagtttacttgtttgctagtcttgtatataaacagggctctgacaatctaatgtctttcgccagccatttataaaagtgaccatgtatattttatggtaaaaagtaagtgcattttttgggcactggtaaataatgatttgttttgtcctgttatttttttgtggaaagaaaaatcttacatttcagtcagatgtttgtagtaaaagaaaattgtcatattcagtagccgatgataaatacattttttgtgttgttatgtatactatactgttttaaagactaagctattttttggctttttaattttttattgtgataaatttaaataacataaaaactaattgtgccccataaatatagacaattattttgtattaattaaaaataaaataaaactttaaaaagaaaaaaatttaaatagtagctgagaataaaaactagatcaacttagatattattaaagtcctgggactcacagaaaacaatacactgagataaggttatatttgacacctaattgttaaaaggagagataaccaaaccaaacaaaaatagcattatttctatttagcctattgcaatgtttttgtaatagttattgaaattcagagtacatttataaagctaaaggaattctttaattattagatacagaaaatgtccttgaatgggagaatagattgagaaaacacagtactcttcctattttaagaaggtcaaaatatttttagaggacatatttggtgtgtttgtttaactaaatattcaatatgagcaaagaagttacacaatttacttttaacgaaaaaaattttcaaatagggaggagagagacgaggagagaacagatgcttctggtggtgcagcagcacaaattgagcaattgtccagtaggggttgctcatagagcaggaaggctgattgttccagctacaagtttcacaacttcaagtagactgggatttcaaggccactcaagtgtcttagtcgaaataacctctttatgtactccggaagtgacccagcctctgatatctattaggataaaatagtatgtgtgaaattaaagaattgctaaataaatcatttgaagcttgtcatctgccttaaaatgacattttacaaaccacatttaatatgttgctgtgcattagtgaggggagctcataactgcttttccaaacagaatcaaagtgtagttaaattgtttttaaacacagatttagagaatgaaattgagggtagtaaactagtagccaactaaagcaaaacaggctggaatgttggtaaccgattgtacacacaggatccaagcaaaacatcttgaattgctagtacagtaataaattatagttttcacatttgtattttgcaagtgaaaacagcactaagtcaagcttgtgaaataaagaccaaatgatgacgtttttaattcacccacacctatgatgacccagtagacctgcctcatcatgcaataaatggaataactgaggctgaaaaaagaaaagaccagtagacagaaactccatagtttttgtatgcaattgtagatgggaaaaaatggttgagagaggcaaagggttaattgtcacaaaggatctaatgaatgtgttgatttcttctccttcctttgtccctctctcctcacaagatgacccataccacattcagccaacagtcaaggagctatctcattttctttagggttaattttctcttcttaacgtaatgagataaayggctaaatggggttggtgtctcgggagtgttcagagggcaagaaatggtcaagaactggtttatctccaaagttcattagcctattagataactgacgcagggcaccccaattatctcaaagaatgagagacttctaagagatgggagtcagtccttataataatggaacttggctgcctgcttcagaaaagagactcgcaaatccctttcgtggagcaggactcttctgggtggagaggatgggctgatttatttctctgtggtgtcctggagtgtatctgccctgattgactcccttggtcttgacatcagtcactttggagtcaagataatgaaaactacattaaagaggcccctccagtttatgcaaatggaactttttcttcaaagggacaatatccttgggagaatttctgtactattgaaaagtattaataaaagaaaatgtgttggatatttcctccctcctactcctcattttctctaatttacataggagtgggagtgacattttttattttgtttcattaaaaccctaaattttcctcatgctttatctaaggaagtcaaattgtatttagtctgaaggttgctgcatggaattagtaaggacataagtgacacttaacattattctaaacaattaaagttacacactttaggacatcttgggactggatcaagatgactggaggagcatcagttttgcatctgaacaggtgtgccttaggctaacagggcaaaaatgataacactattagcaatgacatctgcagttgtagcttgggttgccactcaagttagaaaagaatattatgttatgtctattcagggactctttgggggagggaacaygagataatgctcaaggagggaatattggaatcatgtgggaatgttgtgtttccctatctttcctacgatgctaattatttaacaaataatatcaacataaatgtgacaataaatgaggactgtgtttatatgacacagtccatgttgactcaacatttttggagattgatttgaaagagtagaaggagtttcttaacacagcatagtgacacttccaatcagtgaccagaatgggacttagcaagaaatcattaaagaatgaatagtttacttggtaatctctctggtgttttcaaaatgttgccaaggttagagatacaggattyagtttgaccttgatgtcaggtttgtgttccttggtattctaaattgagaatgaacgggtggtttatgagtgtccaacaggagcttatcctcacctgaactttctttaacaaccaaaaaaagagcacaacttgaaggattcttcctttttcttaagaaaaatctatacctagagaagagtgtctcagtttttcagttttctcacacatttttatttattttctggctagtattttgaatataatggacctagatgcagttttgtcacaygtttttatttattttctggctagtattttgaatataatggacctagatggtaaaaagttttatgtaactatttcacatatgactattttccaaagtgaactcaaattgttactttatttttgaaagttgaaatctgtaatatcattcgtactaacactatgctgtatgtatgaaacatggttaaaatgtgatagaatgctcttgcttttaatatcatttttgtcttttccttagtattgccaatcagatagtgatcactaataggatacatttatatagtattccaaaatggtggcttctttaaaccaaatagacgtttaattcaaactaatcactgaaatagattggctgtgaaattatagttaaattatcttaaatgttgtcacaagatgcaaaactacattatagctgcataattacataactatattataattatatacttgtatatattatatagttatatatgttataattatatagtataataacatattatactatataatgtataaaacttgtatgttatacattatgtagctatagttatataatgatctgcggttgcttttctttttttgcttttttttttttgagacggagtcttgctctgtctccaggctggagtgcagtggcgcgatcttggctcactacaacctccaccttccgggttcaagcgattctcttgcctcagcctcccgagtagctgggactacagatgcacgtcaccacgcccagctaattgttttgtgtttttagtagagacagggtttcacaatgttggccaggatggtctccatctcttgaccttgtgatcagcccacctcggcctcccaaagtgctgggattacaggcgtgagccaccgtgcccagccagttgttcttattattacttgacttaggaatctatggctgtacaattacaggtgagattcacaatattgaacaaccatttggtttggcacttatcaaacagaacagaacagatagtggcaataacaatcatcacattctcggtgagcatcattggcgctgaggaagagatatgattgcaaagatatctgttggaggtattattcttcccacacataagcacaaacaacttattacggagaaataaataaaagtaacccagagacttcctttgctagtgaaaacacagaggcaaattcttagagttaagctaagagtaaacgatgcctgaggaacgcattcaaagtcccaaatacttaacttggaagactctccttgtaaggatggcctagcagtttcccttcagcagtagtaaatctggatgagcttctctaggatcacatcctggcagatgagatgctcatcatgacgaggcccagcctatgggagatgggatcattagcctgtttttacattttaaaatggcctatgtgttttcttccttttattttttttaaatcaggaatgcatgatctttgtagaaaatttggcaaaagctgacaagtataaaaaacaggtgaaacatcacccataaaaccatcacccagagcaagcactattcacattattacatgttttttccctagtctcaatctctctttctttgtctctctctgtgtctctctttttgctgaaaattatcttgctgtttggaaagacagtaaatatttcttcctttgggtaacatctgaagctttttgtcccactcmcttttcaactgtaataccacctatgttaagactgtttaagatggctaatcttttagacactgatattcctaaagtgttcaaatggctcttatcccttgagtcaccatggtttgctcagtcttcatgggacctgtgaggaaattcctttcaggggtcttggcatgagctgagagtttagagttcaaacatttcttactttggatcgaaatggaagtaaacagtagatttttttttwtgttatgctcatgactgccaagatttttattttagggttggatgttattttagggttgaattttagggaggcatgatgagggtgatcagtactaaagccttgacttaataaaaagaattttgatggtagtcatggaagtgttcagtgaactctaactactcatgaatcaatgatatcatgagtaatgctaaaattagactcaccaggagaagacgcatgaacaaaaattatgtgattatgagaaaaagaaggaaacttatctgttatcataaacactgattataactctggaaatgcttcactaaacacatcaaaaattctttttgatcagaatttaatataagctcaatgagttgattatgtaagccctctgctacttttctccccctacaccaaatgcctaaataaactttatttttcaagttgaaaggacygttctaaaattcgtcattcttaatgctctaaaacgcccgggttcagaaaattaaattacgccatttttatccgtttgagatcagttctgtttcctcctttggtttgtgtttactttcctgcagtagctgacatcaaaatgttttctggaatgctgggactaaataagttatgcttaactcaatatctaatacaaatagccctggggagcttcagcgacacaatcataaaagctatagtttcttttaatagcttgccacactttgctgatatagtatttctctaatcaccaatctttatgtgccttcctgaccttggagctctcagtctaaatggctttatggtatcaaaggcctgtgtcattggaagagtgaatggctttcatttttccccttgaaacttccagttcctggcatctgtaaagaattattccaagtggtattttgctgccttgyggccactgccctgtccaatggaagtgacttttcccagaaaggtcacagtggtctgtaataggtggatattgcattcagggaggaggcaactctgatttctctatttttttcttttacaatattaattattcttgtatcacattagttatcaaagatctacatcacattttgtttgcaaaatattttggcaaaaaatggtacactgtcatgttctaagcatgaaaggttagcaacaagcttcataaagtcatcctatttgttgggaaaaagacttttcatttacacttgatgggggagattatagcaatgcacaatagttcgtcttcagactctgttcctcttcagcacctcaaaagcacaccaaaaagtgtgacacagcagtgattctggggtctcaaatccacagtatctctccctaactgtgtcaactggctggggcaaccattgagamccaagacttctgactcacaccttattctaaatttgcatttctcaacataattatgttttaagctttgtgcacagtcaatagagggtgatcccatggatatctttccatggcttagacaggaactttgggtaataggtaacrtttccaaaccttctctgtgccttagaatcttaaaagcacagagagcagtgtgggcaggggagtctgtaggtgtgtctgtgtgtgtgtgcgtgtacgtgtgtttgtgtgtgtgtgtacgtgtgtgtcgaaataatgtagaatactagcaaaacctgtgaggcaatttaatatgtttccaatcagaattccttartgcaaataagaagtgtaagaagtataaaatcagtacagaagaacatgacaacgaactttagaggttcttgtatatcatacaattccatctatttatttatttatataaaatctgaacatgttttccctgctatagtgaacaccctcccaattactcctaggaatgttcattgtctgttatttggtctacatttcttgatttttcctaaatrgctcttagaaatctactttatatattaagatattccccattgattccagtttatgctaatttgtcttgtattttataygcattttaatactactgaggattaagactagaaaatagaaatctcctctaattccataaaatcttttactatttggtacattttcttcaaagtcctttttttgtatttcatatataaaatatgtatattttttaaaaatttgattcatatcagatgtacaattttgtaaartgattttttttctattgacatgttaacgttgttctgtgttcctaaatgttcctcaaagccatgttttgtggaatagccaaaataccttaaaggaatacctgtttacgaaaattagtctcatagatgatggttatagagtaacaggcacacttgtcctggcattggaagctacaagaagaaaaaaaaatgtctcccttttggagaggtaacgattctaaaggttttgagatcttagagcaattactagatttggatgtttcctctacttcaacaatcatatgtttgtgtatggcgatggggagagggagagaagtagttttgaagtcctagaatttctgtgaaatgcagttgcatcttatgaatgagttgtctttatcgtcttaacttgaccaaccctttaacccctcactgccccctgtggccttttgcgtgaataacggtgacaatgcgactgccattctagaatttagtttcycagaagtaactgaggtagttggtctgtttatcaagatacgcttgggagtgrggctatctctcacctctgtgtgttggtaacagttttcagtcactctgarcctttgctagatttatatttacatytttggaggaacagtattgagttggcaaccttttgctctgtaacaaatcagcccaaaacataatgaaaacaataaacacgcattattacccaggaatctactgatcagctggtggttcttctgttctgagtctactctgctaggtctagrctggccttgctcacacgtctgggaaagcttgcctggctgagaatgctagggcctctctccacatggttgtcatctccaggagactagccttagtgtgctcacagggcatggcacaagtgctcccagtagccagaagttgctggccccagctggcaagcactttttaagtgtctgcttctgttactcctgctattatctcattggtcaaatcacatcccacggccaagctcagggttatcakgggagggagctacttaaaagcttgtgtgtagagaggaatgcttcactgggtacctgtactgctacctttactgccactttcttcctagtttctgaaatccctttcagttggacagatacaggaccaaattaaaaagttttcatgactgttgctgcaaaatttatgtttctgcaaaattcatattagaatcaataaacctgaatacatagaaacttgttcataaaaaaaaaaaaccttgccactgtgaggtttttttcctcttaagcaaaacaaaacaaacaaacaagaaaacaactctccgagataagtgaatcttctcccagttttggtgtatcattctagtcattggagatatttaggagaataataaatgcatgttttacaaactgtaatctgacatgccaaaaagacatttcaaaattctcatgtccaatacagacattgattctgttrtggcgtctgatttaaaaaaaamcaaaacaaacaaaaaaaaaaaacacaactgtactatagtaccacagtacaccagtactatgaaactcaactggttagtcttaacatgtattttcagataaaggcaatttcctaaagatgagttattttttgttaatgtccgttagatatatactacacacccatatgttgcatatttttaatagaaaatacaatgctgtttcaaaattctgtctttaaaatcagaacccattataaataatttcgtcatgggaatacagaactttgaataattagtagataaaatcatctgtcaatgtcatgcctaattcacacatgaagtgaacagggaacatccaktacatgtccaaagacaccctagattcccacatatctgtgatgtcttgtacatatgatttcccataaattcacctggagagagtgtagactaaggatcttccatattggagacgcacttggattaaaattcttgctctattaattactgtttaatcttgagcaaaatcctccagttttctgtgtttccatagggatgacatagagtcaaataaggcacagagacagtctcctgagtgttagtttcctgccttctctctttcactctttttcttactgtttaacttcagctactaacagcagttgaacactttctgctaagttgcaagccaggcaccatttggaagcaaagaagcaggctgggagcgtggctgtaggttagtcggatctcgctgacccgtgaaaagggacaggctgtcgcttgtgccagacccatctttctatggttgtttgctcctctctccaatttccctgcatctgctttttggagacctgctatatttccgtgcktactgacaaccaaattgttctgcctctagtgcttattatcatacttcaaggaaaaggcacttgggggccgtaaggagaacttaaggcacaaaagccaaaaccttgagtggatttatggacgcactggtgtccgcagcacctccagagagtggatggagtgaggaggataaaagtcggcgactgtccagtctgcataattttgggatgcggcctgtaaggctttaccatttctgtgactttaatttgtgtttttgctaaacattagatggcttaatttgtcagtggatcagaatcaaaaacactttgggacaaccataatgctatcctgagagaacccagggacaagctaattaggaataaagaggagagatggagaagagggtgtatctgggtaacttcatggggtgaaatcccctcatgggaggtggcagctcggaaatctgcatagtaacaaacctgtcacgattcaaggacaactcggcggaacaattagaattaccatttccctctggcctttaccaaaaatctctgcccacactttactctttgcaaccaacactgcggttttgtcttaacatttagtaagctgttgttgaactttaaacatcctttgtaaggtatgcattttctgcctcaagagtaaaaaagagttacatcttttgaattctcatatctcatatgaatcctacactgtttccatttgaatgacaattgtgtattttgaaatccacacatattatatgaatcctaaacattttatttgaatagcaaatgctataaggaatcaagagaatattaaatattttatggtaaataacatctgtttcaatgatttcttcaaacctgtttcattttattctttcctgaaactttaaagccaatcaaaaaaaacagatacactgagtatatatattgttgccttataaaagaaacaygattcttatttttaatgtttcttctatataaaacaatactttgaatgtttcatttctgaacaggtgctcaaaggaaacaaaaaaattaatgatattatggtattttgtaagttgtaattwtatccctgacttcctatttycatcaaattattatagatattcatatatcaaaaagcacagtttccccaaataattaattttttaaattaaataaaatatatcaaaagtagcaataagggtaaaatctcattggtgaatttctgattgtacgaattaatattaataactgacctttaagaagacaaatatatgtgagagtaaatctggtttgcacttctgtctgactttcttctctatctttctgcatagcagcataatctggcatgtttcctattctatcattttaacattttccattttatttagacgtagtgaactaatgcatgcatgtttatgaaggatttcaaattggaagagttagaaaacaatgaagagagatcaacacacagttctgaaaacaaaaggaagaaaaattatgatatttccccctctccttccagaaataacccccaatccccatccctgtcccccagggccctgggcagtgtcacattcctacctcttcctccaggcagaactatgcaagtgtgaactgggttggctcctctgttttctcctttttcaccacaacacaggcacacattcagtccattactaattttagctgcttccttttgcatactcccacaagcagatcttaggccaagccctgaccttgtcctgccttgactaatgtggcatctctgccattcctggactagaggaggagggtggcttggagaaaaatggtatcaaaaacagctcttaaaaacaagaagtacactctgctactrccatgtaactggcatttgctagattctcttgagggcccacaaatrttcttggtataatcaggacccagtggcacccaggcactctggcctgcctgcaaaacatagccttagccagatttaatttgtgacacccaaaagaagaaagtatcggattcaccaaggtgcagtgtgtatactgtctctacttttgcttacacacttcttcctccatgacttgttgactttggaggatttgggacttttccttgcttaggaatattagaagtattgtgggctcttccttacctttagtgactttaagcatcagcattcttctgtgtactgcagaaaactcttattgcaatccaattttcctcccatattttaagaagccattctaggtacttaactgaatttgtgtgtttggaatctccttaagtgactgacatcttccctttgatagtcatatccttaagtcacaaatggacattctcaaatggcattctcatctactttgaccttgatagtctcttacttttagtacttcaaaatggggacaaacataagatttggagcaaagataaaatgaagaatttgaagtttaaacatactgctgatttcagtagctgatgaaaaattaaatttgattttaaacatctgaggagcaggaaaggtattctcttgcatatacacagacttgataataatttttaaaaataggtcacatagcctacatatcacaagcagttaaatactaaattatactttaataaactaaaaaagaagaggaaattgaagtaaaacatccattgccattagttaaaaatggttttcagcattttataagaaatggaatattttgttttattgatatgaggaaatgatatacatcagtactgtctaatggaaatatgtgggccacacatacgatttttaactttctagtagtcaattaaaaataaagagacaagtaaaattattttcaataatatatgattttttaaattaaatatgcgttcctgtgtttaaacacattaaatggggattgactgatgtacctgcgggacttctggatccttaacttgctaatttgtgttgtgcatctatcaacaggttagagtaggatttctcarcctaagcactaatgacactactgacttgccaaaatgtcagccccttgattccccattgcgggagctcttctgttcattgtggtattttaacagcgtccctgactcctccttactaagtgctagtaacacccttcttccctacctcacacccattgagataatgagaaatgtctctagacattgtcaratgtactctgtggtgcaaaattctcctccactccccacccgagccacacactgggatagagtgtggagcaggatctcacccgtttgctcacacctggtgatctaaatgggtgtgcatattctattccaatgattaaccgaaccctgtacctatgcttagtaactgaattgaattaatttgaaatgttttaggctgggcacagtggctcatgcctgtaatcctagcactttgggaggccgaaacgggcagattgctcgaggtcaggggttcaagagcagcctggccaacatgccgaaaccccgtttctactaaaaaaatacaaaaattagctgggtgcagtggcgcgtacctgtaatcccagctgcttgggaggatgaggcaggagaatcgcttgaacctgggaggtggaggctgcagtgagccgagatggcaccattgcactccagcccaggcgacagasagagactctgtctcaaaaaaaaaaawaaaataaaataaaataaaagaaatggttcagacccataggcattatgatatgtttcacaagaacaaaacaagaacatatattcaggacctaaattaatcctgtagtggaaaggaaccctttcattgatgtctgggcagatttgtgtcctaggagacctagatactgacccacagacgtgaatcctttccccagtctttcccacatgaatagaaaatgtcccatctttcttgccttmatgctaaccaggtcgtttgtttacatgtggtaaaattttgatcctctctgaaagttttccttttttttttttttttttttttttgctttattctccctgagccgcaataaatttccacagcaaacctaaacatttcatttgcgtaattaagtttccatatggatgctgatggcttgtttgcctcatttctttccagcaaaattgtaagcaccctgaggttaaagacttcgttgatttttttcaatacctaccatggatcaaggaaatttgttagtaataaaatatttgcttaatgattgacaataaaattgaatgctttcataaaacaacaagctgttcccactaattttaactttttcctagctttaccttgtatttcactcaaatagggaaatgattctttatttgacatcatttatgtgctggacactggacaggattctgggcaaaactgataaacaaagaactcctgcccttggcaaagctcacrgttgagcgcagtagttctcaacctgggaggactttgtcctragagacatctagtcatgtctagagacatttttaattatcacagttggggtgggttgctactggcatctagtgggtagaggtaaagggtgctgctaaacatcttacaatatataggacagagcccaacaacaaataattatttggactagaatgtcaagagtgctgagtttcagaaagcttkggaagaggaggataaatcaaccgatgacagcttaatggaaagtgatgtatgccttgatagagttaggtcgagggtgccttgagagctcacaaaaggaaaaataaatccaagtgtatggctgagagacagagaaggctccccagacgaggttatggaggctgggtatgcagcttgggaaccagcagcagaggagtgaacaatgaggcactggttacccccaagaagaaagtgtggaaatagagccaagagctaggggtggagccccagagaagccaactgtcaaaaggaagcccaggaagaaaagccacaaagagagggaggaactggaagggtggaaagcagcgagatggcgtggaagccagtgaaggagactgtttcaagaaggagagaatcactaacaatgtcatatacctcagagaagctgagtgagataaacacagaaaagtatctttaacataggtaaagaggtcactagtcactttaaagagagaaattacaagtgaaggaagtcttagaagtgatggaggatagattgtcctaagcagagaagtcaatgtggggagataaaaagtgtggatttatcttcaggaggaatgcttatgattatttatagagcagaaaaattgaaaacagtccaacagtctaataaaaaggtatgaaaatatttataaatatatgcaggaatatacagcccctaacaggcatacttttcaggagcatttaaggtgaagggaatatagtcggaatatatgaaaaaatcaagatgccaaccattattcagtatgacacctgctctttttttaggtagggaagaacaaaactacaaaaaatccaaaatattaaatattaacagtttattcatgcatggtggatatgggcaattattattttcctctttgtaaattaatctccaaatgttctaaaatgagcatgtcatacttttaaaatgagaagaaaactttcttaaaagaagaaacttgactgagaaagaacagagaaagttttggcagtaacttgaagggaacacagggaggggaaaggagtgtgtgtgtgtgtgtgtgtgtatgcacgtgcatacatgtgtgtgtctgtatttgagttggaagcgatgagagcatttttgtatattgaggggagacagacagtacatgctgagaggctgaagatacaggagcatggatgattgatggagcacatccctaagggagcaggaggggatgaaatccagatcacaggtggtgggattagccttggctaagaggagagacatcgcttcaactgaaaaatgaggaaaagaggtaaggatggatgtgggtgctgataagagtgtagaggagggggcaggaagttgagggagttactgtttgttggcgtctatttcctttgtgaagtagaaggtgaggtcatttgctgagtggggtcaagggtttacagagaatggagaatgatggagatttggaagggtggttatggagaaaaagagggaggaaggggacttgggacacagagattgcccagctgccttgaaaggccagctgaggctgaagacaggatctttaacaaacagcacgtatttgtgtgtccacatggctttctctaactgtcacatgtttaaaaatagacaaagcaaatagtgagactgatcataacttgcagtttttgcagaaataatgagactgatcataagggctttctgcataaggccctgtggaaacatgattattttgagtgcctgaagtaataaacaatagagtttgtactggaaagggagagaaataagccagaagaaggctgaagggaatggaagccaggtgaggtctacaagtcccagtattgggagacagggagtgagagaacttgaatggtgaaaggtttgggctgtgaatggaatattggacggcaagattctagttatgaaagagtgcttggtggaggggagaggcctcattagctgatgtctctatggactctcccagcaagtgtggctactggactgtgaaaacacagtttcttatcatatgtggtacacagaaacactcacaaaaagaagcaaaatcctctgtgtagattaaatcacattcattctttctcctctctccacacacacccacacacatgcacacacacacacacaattcatacacacatgtatacatacatatatatattcatacatatgacttgaaatattattcagaaaataacataaacgttaacaacagattcccaaccaagaaaaaagaacactggactttgtttctttttttttttctttttttctttattttattgcagaatgtgcaggtttgttacataggtatatgtgtgccatggtgatttgcttcacctattgacacattctctatgtttcgtcccctcactctctacctccccagcaggccctggtgtgtgtgtattgttcccctctctgtgtccatgtgttctcattgttcaaatcccacttatgagtgagaacatgcagtgtttggttttctgttcctgtgttagtttgctgaggaggatggcttctagcttcatccatgtccctgaaaaggacatgatctcattcctttttatggctgcatagtatggagtttgtttcaattccagatatttaattgctctataatttaacatgacactttcacatcagaaaacttgattttctcattggcaaaatgggttaaattatatctatttaacaagtatttttttaagaactagattaaaatttagaaacatatctcagagtttttgaaaccccaaatattatagcttaattcacttattcaacaaagattgattgggaactacaacatgtttgtatttgtgcttggggaattgactgtgaataaaccagacacattcttctcccttacaggtttagaatcaaatgggagaatttaagggattatcatataataaagcacctttcttgccctgtgttgtcctggcctcaagcaatccttccaccttggcctcccaaagtgttggcatcacagacatgagccatgacacccagccttgccctgtgattctatgcttcaccctcttccaagacttaagccagagttctgccagggtcctcctacactcaggggtgtcttctgagaaatgtcagtgtattagtttgttctcatgctgctgataaaaagacatacccgagactgggtaatttataaagaaaaacaggtttaatggacttaaagttccacgtggctgaagaggcctcacaatyatggtggaaggcaaagaggagcaaagtcacgtcttaggtggcagcaggcaaaagagcatgtgcaggggaactgcsctatataaaaccatcagatctcatgagacttattcactatcatgagaacagcatggaagaaacccacccccatgattcagttaactctccccaagtcccacccatgacacrtgggaattatgagagctacaattcaaggtgagatttgggtggggacacagctaaaccatatcagtcagggaagaaggattttggttatctgtgatcacaatctgttaatgtttcatcttatgttacatttatattggtttaattattcaaaatcttaaatgcaagctcctaattttacttcagaatgattattttcacatgcttatatcaatcatacacacatgcacacatatacagatatgtacagaaacacacatatatgcatacacacatacatacgtatatatatacacacatacatattctggtaaaaaaaatttcacgcataatcaaagcccaaagraggttaaatattcagaatattagctcattaacattcagcacattggggataatgtctatgttaatggtatccgttcatctaacagagggttggcattcatacctaggagttgaaagtacatcaaatgctccttgatgagctaagcaaagtgaaaatgtacgtgctattcccctaacaaggaaagccgctkaagtttaaataacagaaaagagcacatggatagagaaaaagttaatgcagaacattttgttgctttattattcagtgacagagattagccagtggggaatatatatatacatgtgtatatttacccatataaataaatatagattttaaactaacagtcacaaaggatatcatacatttcaaatttgcatacaaatagtacttcctaaaattggcaatttgatttactcatcttctgaatatcttctgcaggtgtagtaataattttcagtatgtctggatgcctagaatatgtttagcagtgtcctaagtattttaagtggatcmtctcatttaatttcgacaacaatctctatgcagtagatactactgttattgaaaatttacaaattcaaaagatggggcaactgaggctttaaggaattaagtaacttatctgtcatcgtcattgctcctcattgccccaaagkagagagaacatctcaattcaacaaatcatattgattccaccttctaaatatctcaggggtccaccttcctctctccaacccactgctgcaactctggttccggctgctgtcaactgagttaatgtaaagtctctggtagtctgactactggagtttaataacccaagtggttgactagtgtttacaaataagctcatattagttttgattactaacctcctgctgtcacaatagtcctaacaccataatcagtgtctctcaggtacttccgggtcttcctcgagggagtcttgcacgtgttgaggaatgagtctgtgctcagttgagagccaccaataccagctgtggtctgccacacccaccacccctgcccacacttggggttgctgcttcacagttctcaaaactttacaatcctcagagtgcaaagtgactcttcattccttttagccctcaatgacttttttgtcacaaatgagaggaacgctgtcttccaaactgtttcattttgccacaaaagaacagcacttgtgctataaatctcatatgacacagttctttctacttcttcctgaaggccttttctcttggagctcaaatagccattcaccaggctcaacagagaacacactttgttcggggctgtccattccctgtcttttcccatctcttctctcatttctcaccatacttctttttttttttttttccttcgggaaaacagtcaaccaaacaaagataaatcaaactcatatcaatcaatgcaaatgcccagtggatgtagtgggccagtgtgcaggatgaaggatgtgtagtaaaccccttagtagtgcactggtcatggctcatcaggtttgcccatagccagtctttgaattccaatttaaataaataggggtactttaagtcttccttaaatttaaatataatcacattttttcattctttaatatacatcagcgacttctcattgttttctgattaagttaaaatccctaaagatgttgacaaatttttcattaactgctttcagttttttctctttcatcagcggcaacaaccttctctaccaaccttgcttcaaactccatgttctagagaagggatgggctctagcatgtgggactattgcatgayaaacaaacagcagtgcatagagctattgtagaatgccatagtcacttattctgcaagtttacaataattcctgtttcagtgtcaatttataaatagctactaataactaaaagcatgattttaaatctgcaggtataagcaataacaagcttagttaacatctaagaatgatgagaactgttttagcctttactcaagttgtgaacaaatattatgatgatgactctgctgaagaaccaagcagaggataaacaatgccagtaaatcctaggtattgcaggttcattgacatgttataaatcaaataaagttaagcttgccaataattgaatataaccactttaacatattatttatattgcttattgagcctacaagtataattttgaatagcaatgtttgatactttacaaattataatagcatgtgcataaatgtgcataataatattattttatgtctttcaaggagatgaaataacttttatatgcaagagtttattcatgtaagccaggaactattttagtgagatttactttgtttctattgattctatttagagctgaatctgtagcactaaaaccaaataataccagacaaggtcttaaaccaaattgttaagccttgtctaatcatattatattatccatttgttctttgttccgtttgatgagcatagttaaaatcaggtaactgaagttaacataacttgacgcaaaagcaatgcaagttgtatagcagaacagaaaagtctattttgtgggcagtgaccactaaaaataattgtgagaaatgagtgtcataaaaaaaaaatttgactgttgatagatgtgacaatttatgacaactaatgagaccacttagcagaatctgcatacctttggttgctataggccaaattattaaacagtgttgttaggataatagtttggtgatgagcattgcagatgagttgataaaaattattgacccatgagactaaatacagggactatctcaaaaaccaattgttagaagatatgtaagaacagagacacaaaataattaagtacgtgaggtaacatatatgttaattagattgatttagctattccgcaatgtatacacagatcaaacatcatgtttaacaccatgaatatataccactcttatttatcaattacaattaatttttcaaaagaatggagccatcacaacagatttagaaagatttgtcttgtcatcctcataaggatgtagggcatttatgcaagaagatttattaatataaaaatattagtaaattataataaaaatatatgtaagaaaaatcaacatgtgcrtaattctgcataaggagctaaatgatcatggaggctgagaagcaccatagtagatggttaatgaagtggttaaagactgttaaacaatatctagttgtgactagtcataactgatgactgtggcattggtgatggatatcagaaagaaggcagaagtttggctcaataacaccttgttataacgtattttggtaatagagtcaatttgagttttaaaaaataagtcgttgataacaatgatatattaatgatcaatttccttatcctatttggagaaatacctgatactatgaacgtttaaataacaatgctaattagattagtcttttttgcagataaaccacttattctggaagaaaaagtgcttatcaaatacactgtcatttctttattttatagatgtgctctgagagttcaaataaagttttcctaatttgcatctttgtaaagtggtagagctggagtacaaaccaaggagtttgtttttttctgaatcctgtgcactttttaataacgtcatttaatttgcgtagcaaggtgtgtgaagattaagttgcctactctacgcaaaacataggttatttttctgctggaataatcatttctaatgcaaatttgttcttatcaaccctgttaaactaattcaatcctcaggcccaaactcctggaatctaaagctatttgctgacttgctgttgctgttaggcttgagagtcagcctccttagatagggtgcaagtactgcatggcctccacaattctattcattccccagaatctccataaccagcagtcttatggartcttacgaataagggctattcacccttatgaatagccatgctgacctgcacctgctctgtggcatttaccaggtgccctgtcacgagagtgactttccacatgctatgctgtctacatggaacattcttctttctttctttgccaagctaaacccttctcattcttcatctcttggctcagaggagcttttcttggttgcttctaatttaggaccctgtactactcttcataactcttacctccattgctcttttataattatttgtgtggaactgggtgaatatttgtctccctcaccagattgtaaattcagaagaagagtgactggatctgttgagtccaccattgtatcttctaatttctactatgattcctaacacctagtaagcgcttaatataatggatatacgaatgaaagaatgagttccatgaaagccaagaaataattacaaaagtgttttaaattatcaatgcctttttgtgatatttatttttaagtttgaggaaatacttagaaaagacattcttttcaaaaaccaaagtatttttagatattatgttacattcatctcagcaaatacaccagagtattattgtttaaaggtttggttgttgagacaaccacagttttcaattctgacccacagtgacaagttttcattctatttaagacattttcttacatgctatgagttgagctgtgtgcttcctcaaacacttatctattttaaggggaaagtgttttttttttttaaagcggatacttctgtttaaatgccaaaataaatacatgttaaacaatattctctctgtcttatttttatttttaaaattttttgttatccaaacatcttaacataaactgtcagtaattggctcctagttcaatgacaaaagatatttggaatatctttactttgacccatgcatgctttgggaggaagggtaaaatagagataaagtcaaacttttcttgagttagacatgcttggtaatttatacacaagcaattgggtctagacgccagtgatgaaaaatgtgattctcctaatgttatgtttagtaagatgttttcttggratgagagggtataaagattaatgtctgatcctgaaagaattgggatcctacttacttgacccagcatgtgatatgtctgaacccatgggttttaaaaaatacattcatgacatattatcaatgttaaatctagtatattaacagagaaatctaaaagttgtaattagtgagattttattatggccacttactccattttttctttaaagctgtgtttcgtaatattattttttaaattaatgacctctgatgaaaactatagactaaatcttcagaaaaattcagagatgcacactctcatataattttacacacaacttcaggagttttatatccactagaattcttccacagatcctagactgagaatatctgttcaagataaatctatccaattcatgtgtcttaaatagaaatgatttrtgttacttgtcatgtctcycgttatgatattttatatccagactctaattatcaaaagggaggaataaaggaaatgctcaagagatccatcttattcaaacgaaacctctttttcccctccttctcttcaggctattatctctagaccagagctctattgttcatcctgtactgtccattggctgccaaccagacaagggatgctaatctaggccattgtacaatttcatccctctctgggctgttatgtaattaaaataacttcagtgtgctctcttgaacatttttttctacaggcaattgtaaaaatatagaagttaaaaagcaaatgaaggaagaaaaatataatttgttttctttacttttctattgcaaaagacattacttattgtggacttgttatttatttaatttcaaaattggaatatagtttcttttgtattttgtactgcagaaaaatatctattgatttaaagtggtcattttccaagaatgcttcaaggcagttgaattttaaacatttctaaagcaactagttttcatatatatatatataaatgcatagtgcaaccaaattagtaatttattttctcctggaacctttatgtctgaggataccagaagcaatttaaatattctgtatataggtagtaacttttaccaacattctacccaattgagaaacagtgttgttaaataggtgcagcttcacataggtcaatgccaacactaaactaagtccctaaacctcaatccagaatcatgggttaactaaacatacacactctctcccattgtgtgtgcatacaaacactggttactcttgaatccaattccctctgcttctgttggtgatacttcagctgaaagctttgtagcattcagctaccaacagtcctgtcttataagtcacattattgttttggattcttcatgatttgaaaacaagaatatttgatttgcaaaattttacctctcgttagcacttttttttttttttttttttttggtattttgttcgctggcatgaaaaatgtgctaggcaaaaactcctgtttaaaatgagaagaacgtgagaaggagagagtgacctaccctcactggaagtgaccagtgagtacctgggggcaatacttcatctccttagaggctcaccactgttacaaggggccaccacttggccctagagggaagactggtagaaaacagtgagcgcattctgttgctggtgagcatacacctgttaatccagcttccctgaactgtgcaccgcacttgcgtactagaattcagcaatgctatccatagctagggagaagggggaataataaagatcctcacacgtttgttaaagataccctctaccttaaccaaatttttactgagcacttcaccttccacctcttatggattgatttacaatttcctttttttttttttttttgagacggaattttgctcttgttgcccaggctggagtacagtggcgcgatctcagctcactgcaacctccgccccccaggttcaagtgattctcctgcctcagcttcccaagtagccgggattacaggcatgtgccatcatgcctggctaactctgtatttttagtggagatgggatttccccatgttggtcagactggtctccaactcctgacttcaggtgatccacccgcctcggcctcccaaagtgctggggcaatttcttaaaatcacaagggataaaaatattttagcataaacacacacaacatataattgtacagatgtacaaatataaaaatatatatacaaactatataatgtatcactacataaatatgtgatatgttacaaaacatgcacaccaatagaaattaagaaaggagataaaaatgaaataaacattattttaaaattaattttgagatagtgggatagaaacttttttactatgattttaaaaagtgtttttaacaactttattaatatattcatatatgctatatgctttactcatttctatgtacaattcagtggtttttcgtatagtcactgaattgactggtgcaaccatcaccagagtcaatgttagaacattttcatcaccgcccaaaagaaactgtacccattagcagtaacttcatcctcctacaaccctaggcaaccactagtccactttttgcctccataaatttgtgtgttctgcatattttatgtaaatcgtattgtatggtatgtgtttttttgtttgttttkttgtttttgagatggagtcgcgctctgtcccccaggctggagtgcaatggcgcgatgttggctcactgcaatctccgccttccaggttcaagcaattctcctgcctcggcctcccaagtaactgggattacaggtgcacggtgccacgcctcgctaatttttttgcattttagtagagacggggtttcaccttgttgcccaggctggtctcgaactcctgaggttaggcaatccacccgcctcggcctcccaaagtgttaggattacaggtgtgagccaccgtgcctggcaggtgtgtggtcttttgtgactattctctcatgttttcaaggttcatccatgttgtagcatgtatcactgtttctttccttcttacggctagataatattctattttatggataaagcgtaatttttttatccatttatcaattggtggacatttggattgtttgtactttgggctttcacgaatagtgctgctatgaacactcaagtacaagtttttatgtggaagtattttttcatttttcttaggtgtatacatattattgaaattgctgggtcatagggtaactttatatttaaccctttgagggagcacaaactgtttccaaagtggctgcatcattttacacccccaccagcagtgtatgaaaattccaatttctctgcatcttccacagcatttgctttttattttttatttataataaacattctaattggtgtgaagttgtaaattgttggggttttgatttacaaatccctgatagctaatgaagtgagcatctattcacaagcctatcttttttagacaaatgtctgttcagaacttttcccatttttaaattgggttgcctgttatctttacctgttcacctcattttcaattggattgcctgttagtattgattattgtgtttaaggattctttccatattctggatacaagtctcttgccagatacatgatttgcagatattttctctaacttgtgggttacctttccacttactttatggtgtcctttgaagcacaacattttttaacctcaatgaagcctaattaacctatttttttctcttcctttttttttttttttttttttttttttgagatggagttttgtcttgtcgcccaggctggagtgcaatggcacgatctcggctcactgcaacctccatttcctgggttcaaacgattctcctgcctcagcctccctagtagctgggattacaggctcacaccaccacgcccagctaatttttgtatttttagttgagatgtggtttcaccacgttggccaggcttgtcttgaactcctgacctcaggtgatccacccaccttggtctcccaaagtgctgggattacaggtgtgaaccaccttgcctgacttaagtaacctatttttttgggggagggggtctcttttgcctttggtcttatacgcaaaaaaagtactcctctatttcgtctgagaatattatagttttagatcttacatttggttccatgatccatttggagttaacttttgtgtatggcatgaggaatggagttttactgtattcctttgcgaaaatgcgatggtggttatgcagttgtccctgttctatttgttacaaagtccttcatggaggaagaatttttaaaatattttgccctgctgaattgtcttggcacctttgttgaaaatcaattcatcgtaagtgtaagagtttatttctggattatcaattcagttccattgatctacatgtctatccttaagcaaggaacacactgttttaattactgtacctgtatagtacagtaagttttgaaattagactcttcttcctatattaggatatcttcatagagtttatatatgtgacctttgatgcaggaaatgggtagaaatggtagtatctatccatatatcaaatactggtataatttatgttctttcttatattttaatttaaaaattaaatatgagaagctctggtattttcttctgcacctgaacaaactggctcatgctattgaattgaattattttcttaaagtttgcattttaattaatttatttaattttaattataattacatttaattttaataatgttttaatggatttattcttttgtttcaaatcatcatattaagttcccaatttatagtcttcttaatttttcagtccctttagtgtcattaacggctttcttactgagtgaattcaaaatgataatatgttgaaattttaaagacaaaatatacttaattatacatattactgtgttcatttatctatcagtgaaattatttcatagttggtacagattaatgtatatcttatgaatatatgacctgaaagtaaattcacatactttaccttagtaaaaaaaaaaaatgtgttaccaaacgtatttttatgctcttttcttttttttttttcttttcttctttttttgagacagagtttcgctctgtcactsaggctggagtccagtggcctgatcrtggctcactgcagtctcagcctgctgcattcaagtgatcctcccacctcagcctcctgggactacaggcatttgacaacacgccaactaatttttttgttgtttaattttttatagagatagggtctccctattttgcccaggctggtcttgaactcctgggctcaagcatttctctgccttggcctcccaaagtgctgcgattatagtgtgagccgctgtgcccagcctatttttattttcttttttcatttatttttacattttctctcttaatttcttcttcttctacaaaaatgtagtgtttacagtaaaggtatctgtatgtggaaggttagttattataataatattggtgttttatgtatgacaaacatgccataagcattaattctatttttgaaaaattattaaacaattaatatgtataaatattacaacaatgaacactcataacatccagcttaagaaataaaacactacaggtacaattcaagtttcctatgtatctctctcctattgcccctctcattccttcccttctgaatttgctgtttattttttcatgtatgtctttactttttattaatttcattaacatacttaatatgtgatattaatttgcaaattttggaaataaaaatttttcatatattcttttgctttttttcactcaccatatttgcgatagtttatagtaaatataaactatttgtactaaatgttcgtgaattcttctttaaagtgttaaaacaatttactctcctccaagtagtctatgagtgtctcttgctctgtattttcagagtatgcattatgatttatgatttctgtcatttgctcttgctaaagtccatgatgatattgattctagcccatgagtaaccacccacaggtcaggaagcaaatgtgatcatccagagcaaagtgaaaacccagaagctatacatttggtccctgtgcgatagcaacaagaaagcaaagcaaaacaaaacaaaacaaaacaaaacagaaaaaaatctgttattacaaaaaacggaaccatgtaatttccttaactcagggaccttagcacttcgtagtctccattagcaggccacccccaagaaaatatttaattctaagccagaacattatgcttgtcatacaaagaccttctagaactatccctacccactttcaaatgatggcaatgcctatgccctaccacttagaatgatggggccacaaaggcattgatgttttactaggcaatattgaggaatttacaaaatagttgcataacaactcttctgtcaaagtaattacatgaattttatcagtgggagtggacagatgtttgagcacagtggccttagaccacaccatataatgaaaagttgtcttacacatctcagttagctgagagtattttccagaatgaccatctggcaaaataacccatcaaaacaaagtccccaggtgaatcagctgaaaaagaaagacgaatactttgactgcataaaaaatagactcaatagagaatatgtaaaataaatgttaataaaaaatgcttttgtggagagcatgttaactattcatttaaggggggtaacacattttctaatggtgctcaataagtaaaatgttaacttgggtatttatctaatttttattaacagtagattctgaactgtttgacatttaaatttttcagcactgtaagagagaagcatgctctttcatacttacttagatgtataaacatgaataaaattatctcagtaaaactactaatggtaaaaaaactggcttagtgaaacacttcaatcagttccagagacaacagaaaaatgtaatttcagctttcaagctcaagaaggatgcttttgttaatgaggctgggtatctatcctaaaataaaagtgacctggcatttaatgataactcagtgattaatatgcagtataataacatgtggtttactggattattataactctccttatacattgaaagccatatttcatttgtaaaagtgtataattgcaatcaactctttgaataaacttctctcttctatagtcctattttgaaagaaagttcaaaaatgtttggcccatctctgttcatagttccaataattatgaatctgtcctaataaagtgtttggaagatttaactgtttagtttaaataacatttaccattttttttaattacagttttaatataggtaatatgcagaaaacttggaaacgacatgaaagttcaaaggaaaaataatcctcaaatcactggamcttttctcacattatctcttggctccaacacaaaataattttaggatttcgtcccttggtaatcattttgtctggactctatttctcatattttttttctcagccatttcttggttattttgtgttgtgattgcttataatatgtttccttgttttatcctatccttataataagatcttaaggatgattttatatatatctctctccttattatgcattcatttaaaactgaaaaatatatattattaaagcccactatgtgtgaaacactgcatgggaatgatatgcatgggaatatataacagccaaaggtcatctcttcatggaacttactaactacggttaaggtgcaagtgcctaaattttgttgccaacccacaacatccttaatctcctttgctgtctgtacagtgcagcacaaggactgttgccttttggttgagcaatagatattggatgaacakttataagtaaggaacaaattaatattagacaagtagttatttgtttcttacttatattgccatattccttctggtagacactggacaggtaggatgctgcttactgrattgtgaaattttatactatgatgtaacatttataaaatgcttttgagttagcaractgttttatcttacagggtttcagtgaagctcaagtagaacaatacttacttactattaaaaaaaaagaaaggtagcrggtggtgttatttaaatggagtccttacggtatcaaactactcattaacaggaaaaatatttagtaaccccagtcatctaaaacatggccatgtgataaaaaaagaaacatggcctttcatttccaaatatctattgcattttcttaatgcacagacaaaataatatggcttctagaaagtatgagaaaatatataaaatgcagcagaaaataagttaaaagatgagttatatccagtttctggttcaacgagctttcaacgttatacaaggaaagatcatgttacacacacacaaaaatgtgcatgcacacacccatgcaaaatgtatttagagcttctccttgcatttgtcacctggttaattccaatttgtctttcatatttaaaattaaacatcactttcttaaacaaaatttccctgaacctcttcaacaggtttttcttaaaagtttttcatatcatcccgaatttttcctgtatagcaytcactgtatttataattacattgttgtacgaacatcatagagtatacctacacagacctagatggtatagcctactatgtacctaggccatatatgatagcttacttttcctagcctacaaacctgtacagcatgttactatactgaatactgtaggcaatttgtgtatataaacatagaaaaggtacaatataaatacagtttattataaaaggtaaaacataatatacctggataaggcacttagaatgagtggagcttgcataactggaagttgctgtgggtgagtcagcgactggctgatgagtgaacatgaaggcctatgacattattgcatggtactgtagacatcataaacactgtacacttaggctacactaaattattaaaaataaagtaattgtgctatgacattaggaaggctcatacgtcagtaggtgaragggatttttgtgttccattataatcttctgggcccagtgtcatatatgtggtctatccttgaccaaaatgttgttatggaatgcatggctgtctttagtatctgtctccttactagagaataagcataaaaaaggttctgcacactagcaaagtgtccagcatggagtgtgagctcaagaaatagttactgcatgcaataactctaatatataaaagactatggcagggaaaggagagagaaaaacaaaatgtgatgggaatgtaacagaaggggaaagcgcaattaatgtgtgttcaaaaaacactgtgaaattttaagtggaccttagaggatgtgtgtagtgctgaatgtggagcttcatagccacacatagaggggtgatctagaaaggatggcttggaagaagcatgaatgttcatggtcaacatatccatgagacacagcagacacagtgcccaaagcctatgatatgcttgctgttaggggcccacaaaacattttaaattttaatttcttaatcagaaaaaaatgaatctaatcatatgaatatataataatgaatccaatatatgccaatgtaggcttaaaatgtagtttttaatactattttttgaagtccacaaaggtaaaattgcacagggcccctgaaagtcatactgcagccctcggaatgatatctgatattcagtagatagtattcggttagaacttagaaaagaataaatgatctaaggcttaaaatgtaggttagcctcaggtaaaggagagtacaaatgacaggctgtagagattcttcaaatttgggttgaccttcggagtctttttgtgttaatgtcttgcttactgcagggcttcaggaagagaawtcttgcaggaaggaataggactggttggtattagaagttgggtgatcagttaggagctttttgccatgtcttacatgggagctgaagaaattatagtagaaagaaagggaggagatggatattacaaaaaatcagataaacatgtacccaggaattgtagatcatatgtggaaaagcttccttttcccgacataaccccccaaatcataattatatatttgtgttccctgtaacagtgagttccatatgaggaaggactatattaatcttactgctgtgtcctcagaacactgaacacaagacactcaagaaaacaggagagttagactcttgtaaaagtgtataaaccattgtagctagaactaggtccctgaccaatccatcccaatcatcgaagcgaatgcccaaagcctcaatatgtgaaatataccttccaattgattgatggtttgattattctgtagagcaaaacagaagtaacaacatacacattagttataacctattttaaagttgattttaaatcattcttttttctaaattcagaaatctctgcttatggtctgtaattaaatctatatttataatccaaatttatagatttatatgcagcattaactcatatcatgtacagagaaagctacaattacgtaaaaccacataatacgcaatgagtacagttgtgttgtatacagatttgttagctttctcagtaagtttctcagccagtgtaatttgtacacttagcatgtaccaagccttgagtgaaaatacaggatgagtatgacctgtgatggcacatattaggtagaaggggagcacctagtctagcaggaaggttaaggcaaggccttaactaaggagaagtaatgtctgcctcaagtcttgaaagaacaaatgctagtcagrtaggaagcagaagcagaagagcacacacatttataaaattactagaattagaygtttaaaaatactttggtaacatttggagcaacagtttctttatccatggcaagagagtattatgttttttaccactgttcagctatttttcacattcgttaggaaagataaataaaaacagcataaagattatgaactccctcatgttgaagataaaatattcagtgtagtatatatatttttgataaatatttttattaataaataaataaattctttattaataaataaaattttgaaagaatatatatttaaaatatatattttgaaatacatacctttttttgcacaaagctcgctgtgtagcattgatgattaaataagctgcctatctgtgtttgagaatatcttttcttggagacagaggaagagactaactgaatcttccataaaattccaaactgtgattcactgattcggtaagttgggaaggatgaagaataataacagcgttaaatcactgaggatatatttaatagtatattaaaaaccaaataattttatagtgttgaaattataccatacaaactatgaaatattcattttcttctataccaatatatgaagactgaaaggtgtcaaaatataattgtgtaattggtcatttttagagacatccatagaattcataaacaatattcactgaaataaattcaggagagaattttcagaattaggcctcactggcagtttgaaagtgttgaattgttctcccacgttgtgtggcagttctggggctgtattcaaaacgttggtatctaggtaggaaatgagtcaaagtcgacgttactcttgaggttaaaggtctgtttctttcaatcagttcaaactgacaggcctcctgccatcacctcctccttagccaggcagacaggccctggccgtcagtgtgaaaacatctgttgaatggatttattgactggatcttgttttttctctccctttctctattttttttttctttttccttcacaccgtttattatgtctctgacctgatgaacttaatttgttgacatgtcgctcagtgtctccctcaatccttgtctcacatttctttctactgtgctcttttcttggcaacagcctttcctggaacccacgcacacacgtgcgctctctgtgcgccaagctccgctggctgcggttggcatggatggattagagaaacaccgtctcgtctccaggactcactcttcccctgctgcctctgttttacctcacccrgcaatggaccgccccctccagcctggctctgcaactggtaggaatccctaaagactctctctaataggcaggctaaatgccccgttcttgtaggattaaccgatttaaatgctctgaataactccaatagcagaacactccattttaacccagtgcaacccaaattttacgaggttatattggctataagacaaacagcacatctgataaatcttgggcttagtactaatagcctcataaattgctatcatccaagggcctggaaaatacatcaacaggtgcatgagttttttggaaatgaaaatccctgcaacattctttagcagtgttcctcaatctctactcttaccttctgcccagtcactaggaarttgatgatgcttggcttcctcatttgactccaaagagtaccctttaaccagtttgtttttttgtttgtttgttttatttcactgttttcttctggttccccatgcaaatgactcatgggattctatagtaccaaagcaaacttcacttgattctatgtatgttactttcatttctattcattatggaatctctgggtgggcttttcgaccaacctcttcctttgtctacagctgtgtttgatatttcagaacctgactacagaggaaaacaagccagataattccaaggccaaaggaaggttaagtgtggaacacacacacacacacacacacacacacacacacacacacacacaaagggtgctattccctctgcaaaggaacagtgctgtacatatatgcgtggataattatttctttttgtgtactctactccattctagttccgtgttctcaaactgtggctaatcaaatgaaatatattgtagccctaagagactcataacttggatactgcagaaaacgaatttatatgtaccttccccaaaggctcttttgagttctctgatttattttaaaatccattttcaggattcagagcttgtttttgtggcttctgkgacctcatgcaagccttcgtgcttggaaaagttaaatctattttctaaaaccatattcccaagccttgatattatctttagtttaaaaattaatgaatgaaatagccaagttaattacctttggtaggcatctttaataagtatgcatagaagtgactttttataatgttttatgccataagaaaacattccatactaggagctatgagctgggtctatttctttctccgtactagccattgcctctgactcttctacttccaggagcatagcaaaactgcccagatattccggaaaacccaggaacactgcccagtgttagtggcagccttttgaatcaatcatgcctggtgctatscctgtggattcaccgagtttttgctcaaaaccagatacatgatacagaggaataattttttgcatgtagaaagagcaatagcctttaagaattacytactctctattctttctcctgaaagtgtcttttattcaaccctaatatttcagaaaatacagagtaacaaccattctatcaaaataactgtttccattgactgaaataatttccttaatattataataatattaaaaattaaaaataatattaaaaataaattccttaagtaagcttaactacaaagtttcctgttgatgtgcccaagtttgctactgtatattactgtaatcctatggataaagtttctttccttggttaagaggggtggcccttttctgacatacttcagtgtcttctagttttcatatgttcctttgaatgaatgaagcaagacatctgaatattagagagaacctggagtttaaggaaactgtgttgccaaatggatagggtttgtagaccttagaagaatccagatgcaagggtagactgtaaacccagcaacataaacaggacataatcctaccctgatcattcaaacaaagactaggtcatttcagagagttaggtttttttccccctcataatgtcaacattttagtatttatcaaagcatgtattccaaaaacaaataggaaagtgaacttaagattctttttatatataatggatttgataaggcaattccttgtccacatgagatattatataaaattattttagaaaacacaggattttgtacttaataggcattcaataaacattttagttgaatcaatgaatattaatttcataataaacacgaatttactagttcaaatttgaatacactgaaagtaaaarttacattgtaactattgttccgctaaaggatagctaagttatttacaagttacaataactaagaggaatatttgttagctcatttgaacttacaagaatgttgcatctttacactgaaaatcttacaagaaaaacgcacaatattttaaaatcatgcaacatatgcaatttataataatagcttctccactggcattgggattaaaatatatatatacttgatatgtaacattcatttagtactattccaaatcctaaggaaatgaaatgcaccatcttcactctgctattccacatattgctctggctttaatccaatcttaaatttcccctgtagcctgaaaactactgtaatccacatgatctcaaaaatcactttagtatttctaatgatcttgatttcagatgagaactgtaaggttttcattctagtatgattgaaaatatatcttttaagcactaatctcctttcttttgactttttaatatctatttgttgcagacatgttaaacaatctaaaggaacattcacctatgttctttaggaatacagtagaccttcttatctgcatgggggctattctaagactcccagagaatgcctacaacagccagtagtattgaaccagttgaggtcaataggaacccatttctgttcatgtcttccacccataaatttatggtcttttccatcttaactaagcacttttcacatgctgtggccatagcttttgtagtgtgaggtgtggtgggacagaaaacaatcacaaatttcttttttcttcatcacaacttcagggatagaagattccttcttactgtagagcttagcaactttagcatatgatttttttttaaatttccttaagtcaagaacttaaacctttcattcaaaggaagccctttaaggcttgtctttggcacatccaaactgttagcatcactactcttgcactttggagccattatgaagtaaaaaataattaaaagcatgcactggtgacactgccacagtcaacctgtcatccagacagctactaaatgactaatgggcaggtgacatagagagcatggagctgctggagaaagggataattcacatcctgggcaagccggagtggggcactgtaagacttcaacatgctgctcagaatgatgcgcaatttaaaacttagaatttggttgttatataattgtgtatttctggaattttccagttaatattctcaaaccatagttgaaactgtagaaagagaaactgcagatgggggaggggagaggctatttgtatttgtattttttttttaaaataaactcatacgatctcacattctcaatagctgttccactaaatagcaaggtagcggacacagacacattataaagctaggcggctggcttaaatctatcctctaagagctatactttttggtgctactaagaagttatttaacacaaaagtcacataattttcaatgcacatcatttaaaccttcaccatccatgtgcatcctccacagcccactggattagscacacaactccctttttgacaagaacaaaaaatgttccaagggagaaatattatctgagtttagtcagttttggaaagatgctgtcttcattctatttcctgagagcagaaagtaggcataaattgcataaaattatttttaaagataattttttttgagacggagttttgctcttgttgcctaggctggagtgcaatggaacgatcttggctcaccacaacctccgcctcccgggttcaagtgattctcctgcctcagcctccctagtagctgggattacagtcatgcaccaccacacccagctaatttttgtatttttagtagagacggggtttctccatgttggtcaggctggtcttgaactcccaacctcaggtgatccgcccatttcggcctcccaaagtgctgggattacaggcatgagccaccaggcccagccttaaaaaaatgatattcttaagactatactgtaagtttttcccccaaacaaaagacataattgaatttaaactttatcactaaatatttggtgaatatgaatacatgtatttttagtagagacgggatttctgtatgttggtcaggttggtctccaactcccaacctcaggtgatccacccgccttggcctcccaaagtgctgggattacaggtgtgagctactgagctgggcctgagataactgttatatattaattgaactttcgtggtaacatttatacttttgagaattataaaaattgatacaagttcattgaaggcaatttggtaaatctagaatattataatggaaagtcactcattattctcccactcagaggtaacctctattaaaatatgtttatacttatttttcaatcaatactttttactctataagcttctctttaatagaataaagaaaagtgatttgtatttgtatrcatatctatgtgcatgtgtgtatgtgtctatctgaaagtatgtgtgtatatttgtatgtgtgtatatacagtgtatatatgtgtatatatgtgtatatacatatatacactgtatgtatgtgtatatatgtgtatataatgtatatacacacacgtgtatatatgtgcatgtgtatatacacacacgtgtatatgtgtgcrtatgtgtatayacacacacgtgtatatgtgtgcrtatgtgtatatatacacacacacgtgtatatgtgtgcgtatgtgtayacacacacacgtgtatgtgtgcgtatgtgtayacacacacacgtgtatgtgtgcgtatgtgtacacacacktgtwtgtgtgcgtatgtgtacacacacgtgtgtttgtgtgcgtatgtgtacacacacgtgtrtatgtgtgcgtatgtgtacacacacgtgtrtaygtgtgcgtatgtgtayacacacacgtgtgcgtatgtgtacayacacacgtgtgcgtatgtgtatacacacgtgtgtatgtatgtgtatayacacgtgtatgtgtgtgtatgtgtatatacacatgtgtatgtgtgtgtatgtgtatatacacatgtgtatgtgtgtatatatgtatatatacagatatacatatatacatgtgtatatacgtatatacacatgtatacacatatatacatgtgtatatatacatatatatrtgtatacatgtatatatatacacatgtatacacatatatacacgtgtatacacrtgtatatatgtgtctatacatatatacacgtgtatacatgtgtctatacgtatatacacatatatacatgtgtatatatgtatataatgtatatatacacaggtatatatgtgtatatatgtgtatatatgtgtatataatgtatatatacacatgtatatatgtgtatgtgtgtgtgtatgtatgcctgtgttaaggccttctagagtagcttctgttattactcatattagaatagagagactaattttttcttttgtcaggaaatctattttttaaattgctgtcctcaaatatatatgcttgaaatttctttcaaaaaactcttccaaaatttactcatctaataatcactgaagaagataaaaagagctatcttctttatttaggagattaattcaacttgatcacatatatcatgtatcacatatcataacataaacattaatgtagaaaatatatttataaatatagttatataatacatattatttatgtgtatctcatatgtatacatacatacacacacatatatatttttttgggggtatgctttttatacctaagaatttcatcctattaccttcacacatgttttgaagacagacttattgggacacaagttttttgtctgaaaagtctggaaatgtgatcaaatgttcaaggggtttagcactgaagagtagaagtctgaggccaacctgatatgcgtttctttgtgggaagcctggtttttcttttctggagataagacatattttgttatcttgttaatttaaaaaaatcatctttgtgataaacatttgcaattacttatcaatgcacaaatttttttctacttayggaaatatcctcaattagtcctatttcacgtataccttgttttattacattttactttaaaaatttaaggtttgtggcaatcctgaattgagtaagtctattggtgccacttttccaatagcatgtgttcacttcctgtctctgagtcacatttgggtatttctcacaatatatcaaaacttttcatcattattatatattatagtgatgtgtgatcagtgatctttttcattatactttaagttctagggtacatgagcacaacgtgcaggtttgatacataggtacacatgtgccatgttggtttgccgtacccatcaacttatcatttacattaggtatttctcctaatgctacccctcccccagccctccacctctagacaggccctggtgtgtgatgatccccgccctgagtccaagtgttctcactgttcaattcccacctgtgagtgagaacatgtggtggttggttttctgtccttgtgatagtttgctgagaatggtggtttccagcttccagcttcatccgtgtccctgcaaaggacatgaactcatccttttttatggctgcatagtattccatggtgtatatgcgccacattttcttaatccagtctatcgttgatggacatttgagtcgattccaggtctttcctgttgtgaatagtgctacaataaacatacatgtgcatgtgtctttatagtagcatgatttataatcctttgggtatatacccagtaatgggatcactaggtcaaatggtatttctagctctagatccttgaggaatcgccacactgtgttccacaatggttgaactagtttgcactcccaccaacagtgtaaaagcattcctacttctccacatcctctccagcatctgttgtttcctgactttttagtgattgctattctaactggtgtgaaatggtatctcattgtggttttgatttgcatttctctgatgaccagtgaagatgagtattttttcatgtatctgttggctgcctaaatgtcttcttttgagaagtgtctgttcatatccttcacccactttttgatgtggttgtttgattttttcttgtaaatttgtttgagttattcatagattctgcataatagccctttgtcagatgggtagattgcaaaatttttctccattctgtaggttgcctgttcactctgatggtagttcctttgccaggcagaagctttttagcttaattagatcccattcgtctattttggcttttgttggcattgcttttggtgtttttgttatgaagtccttgcccatgcctatgkcctgaatggtattgcctaggttttcttctagggtttttatggttttaggtctaacatttaagtctttaatccatcctgagttaatttttgtataaggtgtaaggaagggatccagttcagctttctacatatgtctagccagttttccctgcaccatttattaaatagggactcccttccccatttcttgtttttgtcaggtttgtcaaagatcagatgtttgtagatgtgtggtgttatttctgaggcctctgttctgttctattggtctacataactgttttggtaccagtaccatgctgtttttgttactgttgccttatagtatactttgaagtcaggtagcatcatgcctccaggtttgttctttttgcttaggattgtcttggctatgcaggctcttttctggttccatacaaaatttaaagtagtttttccaattctgtgaagaaagtcaatagtagcttgatggggatagcattgaatctataaattactttgggcagtatggccattttcacgatattggttcttcctaaccatgagcatagaaaggttttccatttgtttgcatcctctcctatttmcttgagcagtggtttgtagctctccttgaagaggtgtttcacatcccttgtaagttgtatttctaggtattttattctctttgtagtaattgtgaatgggagttcactcacgatttgactctctgtttgtctgttattggtatacaggaatgcttgtgatttttgcacattgattttctatcctgagactttgctgaagttgcttatcagcttaaggagattttgggctgagacgatagggttttctaaatatacaatcatgtcatctgcaaacagggacaatttcacttcctctttttctaattgaataccctttatttctatctcttgcctgattgccctggccagaagttccaacactatgttaaataggaatggtgagagagggcatccttgtcttgtgctggttttcaaagggaatgcttccagtttttgcccattcagtatgatactggctgtgggtttgtcataaatagctcttattattttgagatacattccataaatacctgatttattgagagtttttagcatgaagggctgttgaattttgtctaaggccttttctgcatctattgagataatgatgtggttttgttgttggttccatttatgtgatggattacgtttattgatttgtgtatgttgaaccagccttgcatcccagcgatgaagctgacttgatcgtggtggataaactttttgatatgctgctggattcggtttgccaggmttttattgaggatattcacattgatgttcatcagggatattggtctaaaattctctttttttgttgtgtctctgccaggctttggtatcaggatgaagctggcctcataaaatcagttacggagaattccctctttttctatttattggaatagtttcagaaggaatggtatcagctcctctttgtaactctggtagaatwygggtgtgaatccatctggtattggactttttttggttggtaggctattaattattgcctcaatttcggagcctgttattggtctgttcatagattcaacttcttccggstttagtcttgagaaggtttatgtgtccaggaatttatccatttcttctagattttctagtttatttgcatagaggtgttcatagtattctctgatggtagtttgtatttctgtgggattggtggtgatatcccctttttcattttttattgcgtctatttgattcttctctcttttcttctttattggtcttgctagcagtctatcaattttgttgatcttttcaaaaaaccagctcctggatcattgattttttgaagggctttttgtgtctctatctccttcagttctgctctggtcttagttatttcttgctttccgctagcttttgaatttgtttgctcttccttctctagttcgtttaactgtgatattagggtcttgattttagatctttcctgctttctcttgtgggcatttagtgctatacatttccctctacacactgctttaaatgtgtcccagagattctggtaagtggtgtctttgttctcactggtttcaaagaacatctttatttctgcctttttttcgttatttacccagtagtcattcaggagcaggttgttcagtttccatgtagttgtccagttttgattagaatatagttttcattagaattaattagaacttaatcctgagttctaatttgattgcactgttgtctgacaaacagtttattgtgatttctgttcttttacatttgctgaggagtgctttattccctatgatgtggtcaattttagaataagtgcgatgtggtgctgagaagaatgtatattctgttgatttggggtggagagttctgtagatgtctattaggtccrcttggtgcagagctgagttcaagtcctggatatccttcttaaccttctatctcattcatctgtctaatattggcagtggggtgttaaagtctcccattattattgtgtgggagtctaagtctctttgtatgtctctaaggacttgctgtatgaatctgggtgctcctgcattkggtgcatatatctttaggatagttagctcttcttgttgaattgatccctttaccattatgtaatggtgttctttgtctcttttgatctttgttggtttaaagtctgttttatcagagactaggattgcaacccctgcttttttttgctttccatttgcttggtagatcttcctccatccctttattttgagcctatgtgtgtctctgcaggtgagatgggtctcctgaatrcagcacactgatggatcttgactcattgtccaatttgccagtctgtgtcttttaattggggcagttagcccatttaaatttaaggttaatattgttatgtgtgaatttgatcctgtcattatgatgttagctggttattttgcccattaattgatgcagtttcttcatagcatcaatggtctttacaatttggcatgtttttgcagtggctggtaccagttgtttctttccatgtttagtgcttccttcaggagctcttgtaaggcaggcctggtattgacaacattactcagcatttgcttatgtatmatggattttatttctccttcacttataaagcttagtttggctggatatgaaattctgggttgaaaattcttttctttgagaatgttgaatattggcctccactctcttctggcttgtagggtttctgcagagagatccgctgttagtctgatgggcttccctttgtgggtaacccgacctttgtgtctggctgcccttaacactttttccttcatttcaaccttggtgtatttgatgaktatgtgtcttggggttgcacttcttgaggaatatctttgtggtgttctctgtacttcctgaatttgaatgttggcctgccttgtgaggttggggatgttctcctggatagtatcctgaagagtgttttccaagttgtttcccttctcctcatcactttcaggtacaccaatcaaatgtagatttggtcttttcacatagtcccatatttcttgcaggctttgttcatttctttttactcttttttctctaaccttgtcttctcacttcatttcattaatttgatcttcaatcactgattccctttcttccacttgatcaaatcagctattgaagcttgtgcatgtgtcatgaaattcttgtgccatggttttcagctccatcaggccatttcaggtcttctctacactgtttattctagttagccattcatctaatcttttttcaaggtttttagcttccttgagatgggttcgaacaagctcctttagctcagagatgtttgttattaccaaccttctgaagcctacttttgtcaacttgacaaatcattctccatccagccttgttccattgctggcaaggggctgaaatgctttgcargagaagaggcactcaggcttttagaattttcagcttttctgctctggtttctccccatctttgtggttttatctacctttggtctttgatgttggtgacctacagatggggttttggtgtagatgtcctttttgttgatgttgatgctattcctttctgtttgttagttttccttctaaccatcaggtccctcagctacaggtctgttggagtttgttggaggtccactccagaccctgtttgcctgggtatcaccagtgaaggctgcagaacagcaaatattgcagcctgatccttcctcttgaagcttcttcccagagaggcagctgcctatatgaggtgtctgtcggtccctactgggagatgtctcccagtttggctacatgggtgtcagggacccactcgaggaggcagtctgtccattctcagagctcaaatgccgtgctgggagaaccacttctctcttcagatctgtcagacagggacgtttaagtctgtagaagttgtctgcttccttttgttcagctatgccctgcccacagaggtggagtctgtagaggcagtaggccttgctgagctgcagtgggctctgcccagtttgagcttcccagctgctttgttttagctactcaagcctcagcaatggcagacaccccttccccagccaggctgctccctcacagttccatctcagactgctctgctagcactgagcaagsctctatgagcgtgggacctgccaagccaggcacggaagagaatctcctcgtctgccgrttgctaagaccttgggaaaagtgcagtatttgggcagaagtgtcccgtttttcaggtacagtctgtcatggcttcccttggctaggaaagggaaatcccccaaccccttgtgcttcctgggtgaggtgatgccctgccctgcttcagctcgccctccgtgggctgcacccactctccaaccagtcttattgagatgaaccaggtacctcagttggaaatgcagaaatcccccatcttctgtgtcaatcacagaagacctgcagaccagagctgttcccatttggmcattttggaatggacccaatcagtgatctttttatagtactcttgtaattgttttggggaaccatgaaccacacccaatcaagacagtgaacttggtagataaatattgtgtgtgttctgactgctccactaagcgggcatggccccatcttcctttctctttttggccctctctattcccagagacactgggaatttagaccaatttataaacccacagtccaattaggccaatttataaacccacagtccctttgtgttcaagtgaaaggaagagtcacatgtctcccaatttcaatcaaaagctagaaatgattaagcttagtgaggaagtcatgtcaaaagctgagataggcaaaagctgggcctcttgtgctggttacccaaggtgtgaatagaaaagaaaagctcttgaaggaaattaaaagtgttactgtagtgaacagacaaatgataagaaagcaaaacagccttattgctcatatggagagagttttagtggtcttggtagatcaaaccagccacagtatttccttcagccaaaacctcatccagagcaagtccctaactcttcaattctatgagggctgagagaggtgaggaagttgctgaagaaaagttgaaagccagcagaggttggctcttgaggtttaaggaaagaagccgtctctgtaacatgaaagtggaaggtaaagcagcaagtgttgatgtagaagctacaacacgttttccagaaagtctagctaagaccgttggtgaagatggctacactaaacaacaaatttcgttgtagatgaaagagcctttcactggaagaagagatagagagaaaactttaagagatagagagaaatagtcaatgactggcttcaaagaataagctgactctcttgttagaggctaatgcagctagtggctttaagttgaagccagtgctcatttcccttcctcaaaatactgtgcccttcagaattatgctaartctactctacctgtgctctataaatggaaccacaaagcctgggtgacagcatatccgtttagagtgtggtttattgaggattttaagctcaatttttagacttactgctcaggggggaaaaaaagttccctttcaaaatatgactgcctaattgactgtgtacctggtcacccaagaactctgatggacatgtgcaatgagattaagttttcatacctgctaacacagcatccattctgcagcccatagatcaaggagtcttttaaatttttacatcttattatttaagaaatacattctataaggctataccttccatagacagtgattcccytgatgggtctgagcaatgtacattgaaaccttctggaaaggattcaccattctagatgccattaagaacattcatgattcatgggaggaatatcaacattgacaagtgattgaaagaagttgattccagttctcatggatgacttcgagggggtcaatacttcaatggaggaactaactgcagaagtagcaagggaactagaattagaaatggaacctcaatatatsactgaattgctccaatctcattataaaacttgaattaataaggagttatttcttaggggttgagcaagaaaaatgttttcttgggatggagtgtactcctggtgaagatgcagtgggcattgttgaaatgacgagaaaggatttagaatattacataaacttagttgataaagcagcagcagagtttgacaggattacctccagttttgaaagaaggtctactatcggttaaatgctataatactaagcagcattccatgctacagagaaatgttttgtgaaaggaagatttcatggatgttgcaaacttcattgttatcttgtttgaagaaattgccacagccactccagccttcagtaactactaccctgatcagttagcagccatcaatatcaaggcaagaccctccacaagcaaaaagattatgactcactgaaagctcagatgattattagcactttagcaataaattaatttttaattaaggtatgtacattggtttctttgacacaatgattccacacttcataggttacagtataatgtaaacataacttttacaagcataagcaaaccaaaaaactcatgtgacttgctttattgtgatatttgctttattcggatgatttggaatctraccagcaatatgtcccaggtattcctgtatttggttagtcagatttcctcctcaggagcaattacaactttttatttggttattttttttttctgaccactgtattttcatcttattatgtacatctagtagtcctttcctttatattctggaggcttctcaagtttgtattcaatagcgctgatctggctttctgaaatgtaaattcctttctttattgcctccagtatagattttaattttgctactctttaatttccttgcaatccctgtttatcatatccagttttatttttattcattccattgtctttttaatttagttctatctctgcctttagctttggtctctgatgttataggaccagtgtcttttgacttttgaagagaacaaaacattttctaaaatcttattttgcttcctatagtaaatcatgttcactgaacgaagcagtatgaatgatattttcttcataatatccgtagtatattctcaacggccctgtttttttttctcactcattcttgaatgtagaaaagctttccagatattttgccagcaaatgtgtagtgaattgtgtttggcttcactttttgccaacttacatgctggttgaatctccttcctggctttacagttaaatggcaacacttaatctaattcctaggccttaacagacactcatatagtgttagttggaaggcttatgttgggaatttcttctacccacttcctttctagctgtctgatactctgttaagatgacttacawgaaaaaaagacaaacagacaaacacaaagctgtaaggtttagaaaatgcttcttatctartgagagatacaatttatcaatttttttaaacagaatttttaggcattatatcatttgcttgctggatacatcaagtttcacaaataatttaaaaattacactgtttggtactttgagttctgtgttcttgttaaaaaatgytgcagatagttatcacaccactacactccagcctggkcaacagagtgagactgcgtctcaaaaaaaaaaaaaaattgcagatagtaaaatataaactgcacttcagcctaggtgacagagtgagaacctgtctctaaaaacataaaataaaaaaattaaaattaaaattaaacaattaaaaaataaattaaaaaaataagacaccgtaagtcttatggatagattagcattatggatagaaatagtaacagccactatgcatgagatttgacggtcattagacatgaaccttgtttcagaatagctttttttatcttttttagtaattctaccatttgaagatcattccgtctttaaaaaaatttttgtgtttttaggagatctttgattctctagcctcacaaattttttctttagcagagttttcaaaagtgtcatatttttacatctcacttttactactagtttttttttttttttttttttgagayggagtttcgctcttgttacccaggctggagtgcaacagcactcccaggttcaagcgatcctcctgcctcagcctcctgagtagctgggattgcaggcatataccaccacacctggctaattttttgtatttttagtagagacggggtttctccatgttggtcaggctggtcttgaactcctgacctctagtgatctgcccgccttggcctcccaaagtgctgggattagaggcgtgagccaccgcgcccggcctttactactagattttaagttaaatgtggtaaaatgaagctgctagaatctggaacatagtgagcattcaataactgtctactgattctgcatcttccaggagaatgccatgtcatatatatttgtgctgtgctagtcctttgtccagtcccttgccctagaaggagtttaataagtgttgtttagcaaacaccttgggaggtgtgaaacctcaggtagttcccagaaatgcaatatgaagttgaatgttaggaactacaaatcaggatcaataattttagtccaaatgttctaaactcagctttctttatagacaagataaattgtctataaagactctatagactcagactaataggtcttactagactgagtgtaaatttgaagacagaaatagattatatggctaaaaaatgacaactacatgcaataaagaaggaaagatactacactagatgctacaaatacattatctcatttaataagactgagagaaagagaaagcacaaagtccaagtttatctaaaaaatttatcaagaaattttaaggatttcttgtatgtaaaaaaatatatatataatacgtattttctacatatatacgtatatatgtggaaaacaaacaactgttgtttaaaatgcaggtaaatattttaaggctcctttgtgtatttttcaaattctaattttaactcttgtcccactgatcaggagaaaaattaattaatctattggcttatgttatattgcaaatggtaatcagtgagccagaaagggtcaaacaaaagtagaattccatatgaattgcaaagaaaagagcaggcttatttctcaccctataagtccatgtttctgagaagccaaagagagagaatgaaagagagagggaaggaatgaagatgaaggatgaggttaaagtttcattttccagtctacctgttaacacctcagtgatacatcattaggatgagtcagtggaagtttggggttccagattgtatatatttccctttaaattcaaatggccttccaagagcccctggactttgaattataatctctaggtacctggcaaaaattcccagctaccattacctgtttcacaattatttttcttggcagtggattatggggaaaatgtcattaaaagggggaaacattactacagaggtaagcttagatatgtcaagagatgaaatagtgaaaaagttaagcaatgtaatgattagactctctactcttttttttttttttttttttttttttgagacggagtctcggtctgtcgcccaggccggactgcggactgcagtggcgcaatctcagctcactgcaagctccgcctcccgggttcacrccattctcctgcctcagcctcccgagtagctgggactacaggcgcccgccaccacgcctggctaattttttgtatttttagtagagacggggtttcaccttgttagccaggttggtctcgatctgctgacctcatgatccatccgcctcggcctcccaaagtgctgggattacaggcgtgagccaccgygcccggcccgactctctactcttgaagaatatatttcttcttcttctttttttttttttttttttttttgcccatgcaagttctcaccctgtggcccaggctggagtgcagtggctcaatcactgctcactgctgcattggcgtcctgggctcaagcaattctcccaccagcagcaggcacaccaccattcctggctagtttttaaaaatttttgtggagacagggtctccctatgttgttcaggctggtttcaaattcctgggctcaagcaatcytcctgcctcagcctcccaaagtgctaggcttacaggtgtaaggcaccgtacctggccaaaaatatattttcaaaatgaggtggatgttatactttttgtttccatgttattaaactatcactttttattttatgaaactatagttgaaaaaaatgttaaacagttcttcttatatagtagtaactcataaatacttgatatatttaaattgtgaagacacgtcttacacatctctgtattttaaatgttattcttccttcctgcttgcctgcttccttttctgccttccttaatgtcttccttctgactttatttaaaaatatttatccttattggactttatagaaaatgtaaaaagaggactttgtgaaattccatgtagaaatataaagctaagtaaaataaatgcctatattagaagcacttagggtaggaagataagggacataaaataaaaggtagaagattaaacaagtaagactacccttcaggaatccaaggagatccaccaattaattcattgaggaaagctttagtggaaatatctgacctatttttgggatacattcattcatttacagttttcattcactcattaaaacatattttttgaggaccggctttatttaagcttgtttatggccactgaaatttcaaaggtaaaaacacgactatcatctgcactctcaaagatctcaccatctaatgaagaaaatatacaattaacaaaattatacaacaattatataattgtgacaaatgcttgaaggagatccagaggatgctaagagagtatatagtaggagacctaatttagagatctcagggtatgcttggtagaggaggtgacattaaaaactgagccttgaagagtgaaaaaagattagccaaatgaggactggagttatggaggtcaagaaggaagaatttccggcatagagggaatagcatgtataaatgtcacaaggctgctaggattttgatctttttgaggaaaggaaggaaggcttttgtaggcgaaatagagaacaaaagagggagatatatgaattgaagctggaaagatggggaggggcctatktatgctggcctggaggaatttcagtctctttagtgaaggccctgaaggatttaaacagaagaggcgactgttgtgtggcaaatggaatagagtgaaagtcaggttctgcattacaaggcaatctcagaagtccagattagagataataamaccttggattgtgtatggttttggcagtggagataaggagaatgaataattcaagatctgttttggagggaaaacagacactgctttggttctttggagggggagcgtcaaggggacattaaggtttctcgtatgaacaatggcagatcttgatgtcttttgtaaacatgggtaatatcgtgtgtggtttaagatcatgaattaaaaatcagagacattttcactttatgaaaaccatgagacaactaagtggagattttggatggatcattcaatggggaagtgtgtaagtaagctgctcataagggaggtcagtcctgaggatgaaaatgtgagaatcaggggaagaaggatagagtttgaagccatttgagtcctaagaatagatattatttggaatggtaaaattatattcttttgttagacataatttctaccacatggtttcaaaatgcaggtgccattcttctgcattatttgagcacactcaaggaaaaatattttcttctcttgagtaacatttctttaacacaataatgtaagccaaaaggagaataaaatgtactttattaaacttcttttacagcataaattamtggtgcttatctattcctgaagattttttttggttgttgttgtaaaacttcttataatgggtgttctccccatctacaaatatacttcgatggtcatttattggaagacatttgatttgttaaataatttcttatgtcaggcaattttgcaagtaacatgtttccacctcaaggaataggtttatgggtagaaatcttctttaaatgagccagagttataattatcatctaacttgttgctttaaaaagtcctattttaagttctgctaataattcatcttatcatgttattatacagtctttcccatcataaggcttacttgaaaatgaaatatgctaatacttgataatttaaaagaagattgtattcattagtatctgtataatctctagtagtggcattgtaatttacatttattttttaaaagaaacactttaaatgccccacgatattataagatctacaacatccatattggttacataatgacataaattatggggagaaacacaaataaacaaagaaactgtttttgaacaaccttgaagaaattactaaacaggataggcagagtgggaaaatcttccgttttattacaaaaatgaaaccttgatctgaagtcaggctagaatgactcatggaagatttaaagagacagcttgtttagtggctccaatggtgtggtgaaattaaaacctctactgaattaaattatctgcctaaaaacaattcataatgatttaaaatactggtaagattacaatatgtatattttaaaatctgaagtgtcttaaaatgtcatcatcttcatcactttacagatttactaaactagggtctgagtactggttaatgcrtaagttcgtgtttttgagtaaatatccagawagacaggtctmaatagttsttatgtgctcctgagaatttgctttgtgatatttcctcctttgttaaatttattttaagaataatgacttttttggagttatcatattatctcctaacatgtgtcattatcttgtacngttactcaatcttgtcctgtatttcccttgtcttraaggaattgcctatgaccccttgatgctgaaacaccagtgcgtttgtggcaattccaccacccaccctgagcatgctggacgaatacagagtatctggtcacgactgcaagaaactgggctgctaaataaatgtgaggtaatccagaattggacacactcttttacttacttaaataaatcatgtaaagaggccagtattcatttggggagtaatagaaaaatattaaccatatagtgcaaacaccatgattgatgaaccatcatagattcaggtagcacagagcttaccacctgactctgggcggggcacactgtaagtacttggtcagtgttgatgagctgagcagctgcctgatgtgtgtgttccaatgctgcagtattattacatatacatggtagcactgtttgtaaacagacattatttattgagttgatcttctgagaaactctttgctaagtaattattatttttggttataaactaaactttggatttagatatatgccaattttgccacatggaaatgaatcaatttaaaatatcaactgtcctcttaccactaaaagtcatttctttttattgaaatgattgatgtgtttataacttgatgaagggatttgaatactttgattttatcattatttctttaaactcatttcagtaggcgcttggtgaataccatttttatttggaaaaatatacctttttatgctttcaaaggttaaaaacaacagtcatatcaattcagaaaggctcccatcatcaaatgtgcaaaatatgtaacaaccagctgctattcgatttagttgctataaatgtccattgttgtctgaaatccagtaacattctgcatttgaatctaaggcatttttaaaagaaaaatgccctycatgggttttctcacattattttaacatttactaattatttcttttactgggtctctgttaggttctaaacatgattcaagtactggaattataaaatttcacaagacaaatatggtcccaaaatgtagtcaacaaaattcctattcaaattcaacttaggtttaaactgagtctgtaaaatattttacttgaaatagaaatgccaaagcagacagaatttttcagcaggtcaagtgcacttgcctacgtatgatagtgtgagttacatcaatctgatccccttcctctgcaaactactaaaaataattgacttttgaagatgcaaagccattcattcagtttgttcatttctatggataaaaaaattttctttatggatttgtttctttaaagggtggataatatattctatgttacaagggaaattaattggtttttaaaaacatcaaaacattggtagtgtcttatggatcgytcagtagttgagattgtgaatgaatataccacaacaccatgtacagatttagtctcacaagttttattatatatttatggtagaattatcaaacagttttcatatttaaagctctgcttttgattaaatgtatcctttacctagaaaccccaaagtgaaggaaaatgaactagatttatttatctggtcctttcctcagtgcaagtctattactcatttttttttgccagtggcattcatattgtatggcagaaggctttcatactctggtcaattttagagttatctttaaggatttcatgtttctgatactgcagtttggaggccaaaccattctcttttctatgcaatcccatatggagtccataaagtagaccagcaaggagaattatttgtggtaggctggtcttaatggacaaaatgcatttattcatgtgaacattcctgtctcaccttttcatctgctctgcaatttttgtgtgcttttgccagctgaggcattgctgcttacattttttcacattcacgtttgtgttatatcctgcggcagctggcctggtcctaactacttcaaattgtcagtggctgatcatagccttcgaatgccttgttagatagtggtattcctaaatcctattacctgaaggagaactgtttatgaaaggaacagagtacasaaataaatggaatttgatatgattcacactggtctaaaaattagaaagtctattatcatccttttctggttagtcwtctttttcaattgcttatatacattrcattattttcrttctttattatttgaaaccatacaattcagtttgtatagcactaaccgacgtaatatcaaacacaagttgagatgtcagaaacactatcatacaactatgggtttgaggagaatagagtctccttggtatcacttaatcacaaaattaacaaataatacactcacaagcccaggtcagcagatttgctcttaattaagattaagcacaaacatcatatccaaaacatggcaacaatgcaaatagaagccacttttcctaacatagtttgatggcagttcaccaggtgtttgctttcttaagtgaagattatgttgccgatattatttatcattatatatgataatgctcctacattatcaaaacacccatattagcgaagaaagtattgcccatataaatttatttactttatgaaattatgagatgctaacctaaaccaaacatgaaatggaacttctaaaastgctaaaaattaattcacttttaagatacctaggamtttaatggcagatggacatctgcccatgtgtgaatgatattagaaaaattcaaaattaaattttagaaagtattaactaaacaaatgttacccttgtgtagagaccttttgttcaatatgagataaaacagaactaaaagggaaacactattttcataacttattttctcttcctgattggttttaccagaagagtaagggagtaaataaaaagggaacacacagagattattccaaaccaggttagccccctcagaaatagtagaatactacctagtgctctcccaagtccattttttttttactaaacacaatggaagcaactgatatatgttccttgtagatttcttctaatatttttgatttgacaaattaagtatatatgcaaatattttactatgttattaagccatcttacaaagatgctaaactttctatttcatgccaaattattttcgaatgccgtgaaaaatacaacacaaatttatcaacaaatactttagcaatttgccacatgtcttaagaatcagagttgttgaagaatcaggagaaaagcacaccatggaggcaagtgatctgtgtgcctggtgggtatttaggctagttgaaagcgcaagaagggtcctacccaaaagcctactggttagtgtttctgagccttctaaaggaatcaaagataatgacagtatctgcccactgaagttcacttattcactcgacagaggaagttgggtcccagctcaggtgtgagtaacttatttaccaagataccccaaggacccaaataaagagaatcaaggctcaagggcattacttctaaataggctagaaggggctatcagaagttaaacttttgttcctttgcctagttgtgtctaaaacacgctaacatgaggaggtataatctctgctaactgggactccaaggatttgagtaccaggcgggatgtcttaggttatcattctctcctaagcagtatgaacaatttcctctctttgttgtgggaaataagaactcagttgtttcaaaagagaggatttattagattccacaggaaagggtataatcaaataggaatataatgcatacaagccaggtcagtgcattgtttttcagtatccacatagtcgtctgccgtctttgggaactattctcccaccacgtctgtgtagccacttctggtaagaagggtatcttgaatgttgacatatttcagaatcatctgaggggatggtaaaacacagattgctcagatctaaactcagaacttctaattcagtaagtctggagtggggtcagagaatctcgttgctaacatgtgtctgggtgattctggtacttttggcctggacaccacacgttgaaaacagtgatgtatccattcgatgatgtttatcaagaatttgagttttccaggcatctttgttaggagtagaagatacaataccgagtacaaaatatacatcccctgtcttcaagaaggttactatatggtgtgatcagcaggcattaattagacaatcatacaaataaatacacrattacaaatttcaaaggggttttgagtcattcattttatattgctgtgattttgaagactcttattgattgtgcttgagcaagaaaaaaatgaggaagattgtggtcagctgcctctrtagtcttgacagcatcagtggggccctgtgaccaagagacagaggaggtaatgttacatgtgagagtgtgaaaaggaaaatatcctagatcttgtgatgaataacttgccctctttgtgttttcatttgtgttctttgtttattggggttactatttgaccaggacaaaaaataaggaatctcaattctgctgacatacagagaagggtcagctttcctcaaccaacagagcagtcaattttacaattaatgaaataaaaaaatacataatagaagagatagcactttgaaaatgctaaaaggattccttcatttccaaacagtagactgatccacaactcaaacttttggtttatgtcaattcatttagcaatgtcgcaaattaatcaaaatgtattctctcaaagatgatcattcaatattagattcgaccttagttttgccattaattatctgtgtgcttttgtcagaccatttaactttgctgatctttggttttcctatgtttagatgagggtgttaggcaagatatttgctaggatctcttacagctgtaatactgtctgacactagaagtgttaagcagttcttttggaacataacactctctttggttaagagtagactaaatttttagaatgtttcagtaaacatattgctcttagtttgtaagctatagtgtaaattggctctgcttactaatcctgattagtagccagagaaaacattagtcctcattatattagattacagtggttacatgggttaacttttttttggcctgacgtggcactgtttttaataagttgaggcagttagtagtccttcatgccaataccacttaattttttcccctactgaatcattcatacktagtttagtgattctgttgggagcaaagagcaaaaccagcagctttcttatcaccatgagaaatggatctggaggggttatttggtgtcctcttcagaaacaagctatttgattaagtagctgggtttccaagatgtgcatgctcctgaagaaaagaaatgtgctcttctgtggtcaaaaaaaattgtggaggttgacccatcatctgttagaaatgcacttgcagttgttttttccagaaatgctcatgactcccagccccaccaagccacccacagacatttgcttgctctcacatttgttttgagaataataacattttataatgcttttgttggattacacattatgtggaatttgcgttgcctttttgtgactaatattgaataactttgcttcgcttaattcataagtaagaaccataagcaacatacagtgctgaaatgtttaactcgtttattcaagtgccaacacaaagtaattacaaaacaattctgggacgcaaaaccaagctactgttgtcccttcagggwcttctcggcagttccaatgagaaaagtggagagcaagtttagtgcagaatcttatgatgccaagaagcagggattccagcatatcttcttgcacacataggtgactgtaaaatacctctttgttttaaatcaaatctaagtaaggaaatacattcatctgtggtgaaacactttggaatgtgcaggttttctgayatcaagactgcaaagcgctgaaaactgcaagttaatggaaattcaattagacatttgttttatagagtagtctaactagatggcagcacgtaacagtgtactgttttgcttagtttgcaaaaaaaaattttatgtgtttgtgccttagaatctaaccacaaaacagagagaaactcaaacagggaaccctgtgaattgtctctaaaggatatggcagtcttggaaagaagtacaagtgatctagatttgatgagtaaaccaggctacattgtcattgttctaaaagatatttgtatatcacagagtggacccaggcagataaatataccaaaactaattgtacaccttatagtcaaatgatttaggatttcttttaacaatgtctgctaaacagaaagaattaatgtggaaaacaaccaacaaaaggaaataagagaggctgttcttctgagtccatttggaaagtaatacagagcttttgaaacagcagcgttgaagcttattaataaaaagagttatataattttcacccatttgaaaattgcagtttttgagtaacaaaaaatatttgttgaaagtttgtttcatacatgatgaccagtttaaaaaagcaaagctttaaattcaaccattaaaatatttatttacaatttttagaaagaataattgcaatgtagggggttcagttgcataaaggattgtgaaaattgagcagttagactaagggataacatttttttcttgctttctggtgaggacagtgatttraaataggtggaagtaaaacttaaaaaaatagagagtatatatgctcgtcaccatttcagagctttattattgaactgggatttgctgttttctgaagtgctttagaaatggctctatgtcctaaaatactttaaaataagtcgtagtgactgaatcaagcagtattaagacacatgaaaggcacttaacattttgaagattgataatatttttactcatcaaycttccgtccaccaatattttaaccattccgtagtcccaagtgttggtcagtacagtgtcagtatcttgcactcagttatgagcagtaagtatggacagctccctctaacacgtggttcttgacctaagctacccattagaatcctctgggtggttggaaacatctgggtgcccaaattgcacccagacaaaggtaataaggtaggacccaggcatcagtaacttttaaacttccccagctgattccaaggtgcagccaatgttaagaactactgaaacagaaacacaacttcttaacataatcttaacgagatagagacaaataggcaagtgaatcaaatatttggagatgggaaagtaacagaagtaagcattaacctgagaaacaaagatgacactaactcacaagtgtcgtacataattttcamaaattattaaaagcgtttattattttgaagttgtcacaggataggaatatgagctgtgaaaaattctcttatttttcaattatgattaagcttataagaaacaagcatcatggaatagctggactccttttgaaaatccttattcaggtttcctgtttggcctcaacctcagtaatttatcattgcaattattttatttgcttgcctaaggcaaatgcataaatcaaagcgaagcgtgttttattgcatttctattgcgtgtaaggttatttcacatagaatcctatcatcttaaggctaaaaatgagctttgacataatttagtcaaacatctttatgttcatagatgaagaaacaaaggcccatagagatatctcatggctgactataggcacattaaggacacgtgggagtcaggaccagaagtcaaggctcccaacttgcaattctctttttttccatgtgacccacagaaaggaccaaaagcctgttaggccacctgcctgcttgattgcctccttccttctttcactccccaacctttttttttttttatgagaaaaactctgagaagtacaggttattacacgaggagggttgtgtggaagattgtgcagttgcaggggcagttaaaaaccatttcttacgtaacattttaagaagcagttggttggagcattttaaaactccagtagttgtgcttaggcataagcaatgagatcatatttttatgtttttttttaagaaagacagatagataaaaaaatcaataagaccatgaattgactcattaaatattaagtatggtatttgtggcagagtgtaactttgacactaagaagtcatttatgattctttattttcttcatttttttaacctttgaatttcttcagccctggatttttggagaaaataaatgaaaccacatccctttatttagagacaatggatgaaatattttcagaaaatgggatatttcagtggaaattcttgcctggtatgtcaccactttgaaaatgattaaagaaaatggagttttccccagtggaggcaggtactytgacttgtcaaatttaagttggacattttctcttagtttggaactgccacaaaatgagccctttcatgtccacaataataccaaaccaatgcaacccatctgttctgctaaattatttctagttccctaaccaaaggcactgctttttcatgcattttatcatgattttwtgccctttattatattttacaaaaggttctgattcctccagggccaatgagaactgattaggacactggcctcaatccaggctttgaacacaggagggaaaggaatagaactgtttccttttttccctgctccttggcagaaaaaaatatgaatctatatcgtgtgtgtgctctgtgtgtgggtgggtgtgggtaggctgcattttatcctgtcacagtatgactttgtagatcatgttcagaacatttcttctataatcgggatgcattaacgggctctctttcagaaagactatttctttaagaaagaaccatggtgtgttgtgagactcaatgatatggtcattttaaataactttagtcaaactcccaacctgaatatagactgtttagggttctgaactaaacatgatcatattcctaaccacagagtaagtgytcagtgagcatagctccttttcagactctcagggaagaaactaagtgcacgtcacagggaacgataaggtaacaatgaacacagtcctacatcacaaatttctttattaagaaggtgacaaaagctatgaggtttcattcctaggcctgtgttggtaaggcatttaagacccgtattgactccaggtgagaaatccccagatgaaatccattccttatttgcattgtgtgccccaatatgctcagaattcttaaaaatctttttgggcaggctatcatagataactttacgtagatatccttcggaccaagtatctctgagaatagaaatcagtactccctaaattaagattatcagaaaactttagcctattttttgactctttatgctattgacctttaactcaagagagccttgagagagagaaatgaaagaataaagggtgcgcagaaagttgaaaatatgagaagtgattacgtgggaatatctatatttaagcctacacaaataaaatactaaattactgatggcaataccagaaaatgggaactggtgaagatctcaatatgaaaggaaaagttgaatgtgacaaatttaaggcatttatacaagtgaggcaaaacggaattactccaggagatcctatgtgttaaggaataaagaaagctgttgctctttcagaattttcagcttaatcatccaccaaattctcctagcagtgtctctgtgagatacaaatttcaaaacatgctttttccagatcctgtctacaggtagaaacatttttttttttttttggtactgaattagttttcactgctctctttctgtagaaacatgtgcactatgtttgtgggctgttctctagcaaccaaagaagcagaaggtgattgccaagaataagtacttccttatatttagtgaaattatttttwaaaaatacttttaataataataataagagccagtgtaaaatagttgcttagagtcaaaagaaagaataaggagaaggagaaaaagataaatcaaagtgaaaacttaggaatagtggtacattttaatggcaaggatggggcctagagtataactagcggagaaaactgttagattaagtcaatgctagatagctgggccaaatgagctgtctttactgttagttgactgatcttacacaaggggatgaccgattcagcaggtttcktcttatcaggggtccccaaaccctgggccacggaccactactggtccatggcctgtaaggaaccaggctgcacagcaggaggtgagtggcaggtgagtgagtgaagcttcatctgtattttcagctgctccctgttgcttgcattaccgtctgagaacagcagcgacattagattcccagaggagcgctaaccctattgtgaactgcgcatgtgagggatctaggttgagcgctccttatgaggatcaaatgtctgacgatctgtcactgtctcctatcacccccagaggggaccatctagttgcaggaaagcaagcttagggctcccactgattctacattatggtgagttgtataattatttcattacatattaaaatgtaataataatagaaataaagtgcacagtaaatgtaatgtgcttgaatcatcctgaagccatctcctccactttttttgtcttccacgaaactggtctctggtgccaaaaagattggaaaccgctgttcttatgacttactagcacttcagctactgtcaattacagtgaatctcgttagcagatgagtgtttaaatgtgtgattgagcattcagctagaatcagtgggattgtgggtgaataagcaaaggtgttggacaagcatagagtgcatggtatgcaaatttacatgactagtgtatgaacacatcaagatatacttaatggtatttaatgttatacyggaagtaaaaatttaatttatagatgaaacgaatctttatagacatgaagaaaggaggaaaaaatcaatgaaagtttatgatagtcatcaaaacatgggtctgatcattagctgcagagctgacattgttgaaaatactgatgtttcactgtatcagcatatacratgttagtggctatggatttcaaagacccatagaaggaggagctcgaagccctcttatttcatrgtgttcattattctgccagaattggttgccacattctgttttccaatgccctgctcagtccaattttagatgactcaaaccatggacttaccattatttatcttgagggattctccaccccctgaaatctcacagttaaaacgtttccctttaatgttgccttcgaattttctcatgcttatttagtctctttacatgccatcctactctttggttgttctggtctcccataaactttccgatattgaatgtttcccagcaagctacttggttcaagatgttttctaatcratcagaaagayggctgaccagaaggccatcattaaatttttcttagtcttcagcatcagaattctgatcttacccacctggaataatttctctaaatcatacttttatttttatagtaatttgaattgggttagacaatgctgaatgatagcatcaaaaacagagaacttcaatgatatacaaagaaagttccataagtattcatgagtttgttcagcacgtcaaggcagtgttaatgagattttgctttaatcactcccttcctgttacccctgcagacccccaccaatcctccctcactgtgacctgatcatttattttcagtgacaagcacagctcggcctccggcccagtaaatgctgagaaattgtcagatattgaagttgtcctggcctgccccttcagtgaaccacacattaacattgaagagtctggcagcagctgcatcaccttaaactagggaggctgaatgtggaattgtcctcgtcctgagagaggtgttgtcacctgatgtttccgggttacctggtggttccttggtcaggaacatgaaaggacagcattccctgaacagattctccttgaatttcactgttgttctgtacttcaatattaacttacagctgccttgtggttatatatatttttaagtgaaatattaacactgtctctgtaatactagaaagcacagccatttccaaaagttaaggctaattaacttcgtgcaccagcacaatatttatcaggctcacagatgtgccagctgaggaatgtagccagaaagaacactttgcatactggataattgaggtttgacctaatgaacagttttgcctgtgttgaagggctgtaatttgttagctggagtgaaagtctctgcctagcctttttggaaaaaattgatggagtctagagtgtctcaaacagtgtctgattaaacagcaggttttgtttttgtttaatttccaatctgtcagagactaatacgcataaaaaatgttaaaaatgaaatacggcaaaagtgaaataaatattgaagagaggtaagattatagtagattcaaaagacataaaaatactgtcaaattgccataaaagtttctaaatattgatctgaatttctgtactgacctcactacagaccattaataaacagatattgacgtgttattgatcccatgggacacagtttgaggaacattggttttaactaatactactgtgaggtgcacacatgggaagtcattagcgtatctgtgatcatcaagttcattaaaatgaaatggtatttatttatgtccttcaagaaggaataaagagtgtgttctaacaacttctttgggtaagtgtaaaataagattgtaataaatttaattatcagctaaatagtagccctgttggtttttaagctgatactttacaaaagagttaactattaatttctgtgttatagctttctcttccatgccaaataagaatatactttatgtcagttgcccatttaggtataagcaatctgttggatctgaaccttccatacactcatttttcaaatattattatggtactttactaagcaaatcagtgtcacattcctacatgatgaaattcagcccattattaatcatcttaaatgtgacttggggtctcattttcttctaaatgttgtcagtggtgtactgttggcttctgctattttcttgcagcgaattcaaggtcgaaaagccagcctggaggaaatacagcttgttcattctgaacatcactcactgttgtatggcaccaaccccctggacggacagaagctggaccccaggatactcctaggtctgtacgggcctccactgtactgggaacagcacattccagcactatcattagtcaacgctggtgtcagttcaaaatacttggcaagtagtgcaacaaaaaatcagtttttccaacagctttgctctgtggagtgagtcatttgcaacagaagccattgtagattaagaaaatcctgcattagaaaatgacaatgtaggttccatggtgtttactttagaattaaccttcatttgaataacatttgtacaatgtgtttttgcatatagaaaaaactacattgctgaatttattgtgttttcaaacttaaagtagaaatgatttacacatgctttatgcaaatttctcttcaccgttcccatttttttgtatcttttagttctttgttctatgaccttaagaaacaaaggaaatagtacaacttgtattaagtgaaaactcattattactatgcccatcacactacattctatagcaagattgcaaatctatttattgccttacctttggaattaaataatacattaaatgcaaaactagaaaactaataaacagttttttgttaatgtatgattwtttgaaactttatcgtcagattttaaaataaaatttatattgcagaactttatataagctttatatgagtgatagaaacaacaggtttctggaagaaaaattagtgacaawccttattttagctgaaatgataatattgttttattaactttttataagtgaataacaatatctaacattggcaatagatgctgatggggtcatgttttaaatgttttaactaaaaaagacattttaggagtttttccttcaaataaatgtattgtgtcagctctaagttattgaactctttcacctaattcaatattatttcaaaattgttttatattaactggtcctaaacaatttgaaagcaagtagataacatacagtaggtaggtatcttggaaagcaattgtaaggaagaattaacagttactcattataacacaatatacctttttaaacaagtggcaagcatctcttaaatttatgaagtgcaggcatatgagtgagcataaatatgcccacacatgcgtgtagcagtataggtagcagtagcttggggagaagtaagaccagaggggaatacataaagattatccaatttttagaaagtacattgctaatatttgatgataaaaaataatgtatactatcgaattaacattgtatattaatatgaatacaaataaatcaatctaaacatatatgctcattttttcctttctattttagaaaccagtctctgtacatgcagatactttacataaaatacctcttttgctgcaaatattgtataataaatgttcttattttaacatgaatcaataaccctacccaactaaccaacaagatgaagtaaaccagacattttaattgtcatgattttatgaggtcataatactcaagcatttaaacataggagactgtgtccatgtcattattttttaattgagttaagaaaaaacaagtagaaaacctccccccactttttaaaaatctctggtcctaaagtataaatcaaccttccaactttattggaacaggctgggattgatcaaattgtgaatataaacacacatttgatatttgagaagtgctccaaaacaaccattgttccacattttaagagaaaggcatatttataagataaatgaagtttaaacttttgcaacatcaaacttttattcataaaacatggcgatgtttttttaaaaaatttgactcttttgaacaaacctattttttgtaaaatatttgatgtgcatatcatttttaaatttgatgattttaaaatgaaattccatttataattttaacttggacaaaggttcttttcatgtatgtatgtgatgaaagcagcaagtacctatgattcaatgtttaaaattttaatctaaataaattagccatttatctcattaattttgaacatatgatgtgaaataatattcctacagttgataatcttagagttagcattctatacatgtgtggagtttcatatacacttctcagtgatcattgcaacaatttcaatattgtgtgtgggctacgtaagtacacagaaacagggatgttgcattctatcaggccttaaggtcgagcactaaagtcaactgtatcaacacttcaaaactacttctctttccctagtgtatccaaaagtttagctaatttttctcaatctcagttcaaagtgaataattctgttctttttaaaggttaacttttaatactttttttgctctttgtggcatttgcattcttctggctttttttattgttgttgttgtttgtttgtttgtttgtatctggaagaccggattgaagctgccatatgtgaatgtatagaaattcataatcgtcaagatgttttctctctttttatccattcctttcacttccatatatcttactacatcccccagttcctcccaacacatatgggagatgtcttttctgagttaaattaatgctatttcccttgatagttgtgttctagagttaggaggaagggtttaaataaaagttcagtatgatgagacctgtcagtctttgtatcttgaaagacatctatagatgataaaataattggatttgaaaatgaacatcatttatctctttaaatactctagaccctgtaaggttacatggagaagacattctctccaattatttctggtgcaaggctttccttagcattaatattcctgtcgctcttatgaccagtttccagtcgtcttgaggctagccaaatttcagtgcattgataagacaacataattaaaaataaatccagtcagtttggtgaaataaaagtttcttgcccatttctaaatttaaagtatcaattwtatgcctgttttgtattatgtaaacattctcctaagtaggtattaaataatagtattaaataaaactctcccaagtaggatacttattttgctaattctcttgggggttaataatttttttcaattactcttaaaaattaatttattggctgggcacagcggctcatgcctgtattcccagcactttgggaggccgagacaggaggatcacgaggtcaggagatggagaccaggctggcaaacatggtgaaaccccgtctctactaaaaatacaaaaattagccaggcatggtgatgcgcacctgtagtcccaactgacgggaggctgaggcagaagaatcggtggaggctgcagtgagccgagattgcaccactgcactctagcctaagcaacagagtgagactccatctcaaaaaaaaattaacttactatgttatcatattatcttcattcctgtttcttgactattaagaattcagacactaaaatgtacatatatattttaatttcacaggtgatatatgaatatactcttgcaaaatattcaaggatacagttatatttttgttaggaacaacaacataagaaaactttactcctcccccaaaattttgatgtgccttttactggtgccaatattgcagttttaatattattttatgatttttatttgtaattctattgacttctcatctttttgttaaaatgaagatctctctttataactagatggcttcatttgtacatatatttttctttatcatcttccatcttttagtaattacatttaaaaaaccaactaatatgatttattgttttcaaaacaaactgtcttctgtgacaataaaagctatttagacttttactgacgtggtgtatgaattctactataaacctgttttcaattttaatttctcatttcattgagcatcaatagaacaaattaatgggataggtgaattggaaatttgtacctggttctaccactgaactgctgagtgacatgtcagagtcccttcagaaccatttgactatgaaatagaaatgttcactgcccttccccatgattactccacagacagattttaatgttaaagatgtaggagcagttactactgtttttctctattcatgtagtagataacgtagaaaataaaagtacaggtaaacaaaataattactaaaaatcccatgaaacaccagttctaagagatactcacaattcagttttgggmatatatttttaaagaagatattttatattgatattgatgttatatagatccccaaatgggattatttttcatagtgtactgtttaaaaaattgtggatgttagaagtggcctatggtgtacttggctttagctctatcttaaagttgatatagctacttataaccagctatacttagttatgtcttaagtagaaattaagaataagtctgtacatttgagaagatatgttaatatttgaaatattttttaaatgacagtatatggtggcataaaccttgtagctcaaaacatcccattgaatgaatatactcagtgaagagctgaattggttaaattttaaaaattgtaatgtataatatagacatggagaccaacttagaaaaaaatcttgtgacccaaatctcatgagcatgtgtttattcatgtggggcaatagactctacatgcaataaaatttatattgatttgcttttagttcttatttgtgtatacagataggcagaacaatgatattctgaaaattgtgttgaataattggtctgaagttttattaatttatttttgcatcaaacgataaataccatgtgacatattattatgtgttaataaatgccaacattttaaaaattatataacctccatttatctatattttttatgtcttcttactgtataggtgatgactctcaaaagtttttttcctcattaccttgtggtggacttggggtaagtacaagttggtttactgcctttaaataacataaaattacaaaaaaaaatcttttttgatttatctattcagttttagggttatttctcagtaaaagttatgctagacttcaggactgcctacttaatttgcagagctaagtgccaagtaaaaacgtggcagcccttgttaaaaataaattcttaagaatttcaagatggtggcaatacagaattaaaccaagagcaaggcccttctaactgtaagttcccgtgtgactgcacaggtcacacactcatgaagccagctttgctaggcctttatatagctggagaaaaggtgcttcaagagagtttaacacagatttgcagcagaattccattttcaatagaatcacattgagtacgcacatacattatattcctggtgaaaatggcataaacttcacaaagtgcttygcattatgggacattttgtttgtgaaccccttggggacatttttgtcttcaataattaaggaagccttttgactcaacatatttagaccacatttcaaggacaaatttgttagaacccagcaacacatgaagaaaaatgtctacatttttgtagatgattagaacatatcctataacctgaaatctatttaaagttaacccttaccagtaacaaaccatcatcctgtagaactaagtgttatgttagaacaacataattctaggtgaagttttcaaagactaaggtatttaagtcaattaaattgactcgatcttgaagggaaagaacaaaactagtcacatgtatatcacgttttaaacaattgttttgtgagaactaaatttgatgcaaagaaatcttgaatattttyagtttattctatcattttgatgatgccagatttagtgagttgtagccttttgttcctttgcttgtgattctgcttactctggaaaacagaatggtagctatatccatttgcctccgtgaggacttacagtttgccgacaaacaagttccaaaacaaccttgtgaaatagtcattaacaccattttgcaaatgagaaagtgaaggctgggagaagctaagttattttcctgaagtcacacagtaaaggataaaaagctgaaagtatgggggtgatgtacacatccttgtcgaggagttccaaaagagctttctagacactttcatggctttcatctttaacaatctagtctcagcttccccccactccctctgggtaagcagcgcagcagtgtggctgatgtggtataacccctttgtgacagctcaccagtgacttttgctttttgaccaccagcatgggacagtcatcaatcccacattaatccttgcttatttttagccaacctcctgtggagctgggagcttgcaaaatcattctggaaagcagaggataagctgacttttaaaatgggtttcattggctttgtgcttattttctaacatctcaaatggctgttttatgagaatggctgcctacctgtaaatggggcaaaaaaatgaaacaaacctaatgactacttaatgggaacagtgatgtggaggaaatcaaagctattaaaagggtggcagtcatcaaaccccactctttagaaatatagatgatcccygagttatgatggttcaatttatgattttttgattttatgatggtgcaaaagtgttatacattcagtagaaaccatactttgaatatacagccattctatttttcactttcaatacagtattcaataaactacatgagatgtttaaactttattataaaataggctttgtgttagatgcttttgccaaactgtaggctaacataaatgtttggcatgaataaggtaggctaggctaagccatgatgtttggtaagttaggtgtattaaattcttttttgactaaggacattttcaaactacagtgggtttatcgggactccttcataagtcaaagagcatctgtatatttaatgtatgactcaggactgaattgaggccatctccctaggactcacctcccaaatctgacctgggacgtgcttttaattcactatcccttcaatgcgaagttcctctactcaactgctctaaacccaaattgacttcttatttctcacctagaactgctttagtaaactcttcaaaatgaccaaggagtgaatattggctgcttcctctggaccagtatatcaaacataatgcacagtgtgggtcatagagtaagtccttagtaatgtccctagagctgacctcacctggatggtggcagcagtggtggtggataagtctggggtaggccagcagaggcaggagaaggagccctgcattgttagtttgactccatcagtgctggagaaggttggagagatgtgatgcttatgtaggtcagggtgggtgtgaatgtgtgtgtgtgtgtgtgcaagtttgcacttgctgatgctcttgtgaactagtttgactcagtatttttgtttacaggaatgaaatagttttctcagcctttcaaaagtcttcttgccctctcagatttttggttttggtacaagccctaggagaaaccctggatcctcttgatttaagcctgtctaaattttcacctccaggacaatcccagacagattagctatacacaagatccccagtatgatcccggaaggccccaacttggcagcatgggagcaccctagagattttggaaattaccgaaatgacttttgtcttaaggcatggttctgtctcaaattacttaagagggacctgttggtttccattctgaaatactcagtgatccccaattgttaaagtaaacgccagttccttagaatatataacttcattctagaggggtttgatatatacctacagaatacggatgggttaattggcttttgaggaccctacctgggacattatgaaatcagaacatctctacttctcattaaaatttcccctaaaattgcacatggtaatttactgttggtcaagcagctcagtggataaatggtatttaaggtgctgtgaaatgtactctccagaactgcatttcgagcaacaatgtcaaggtttctgaattcctttgtgtttgcttttctttttgttcagttattatggctgactcatttctgattcctgtgtgattgcactacaagaaaatgcaccagttgaaaagaacatttgaccaaatcccaggacttggtcatggtgtagtaaaatagataattaagggactctggaaacaagagccagtgcaggatctcttcagttctcactcctcagggtatatcactaaaaatagtgatcattttcctggccatctgacctgctgctgtgtgaagaaatcttgaagtcatttctcagcctcattttcccctcttcacttgataggccacagaaaaacccacaaaagcaaggacgagcaggcttttatgataatgtcgtcatcagctcccagcttcaaacgcttctgyggcttttgagttgtcatttataacttggaactgaatcgacccataattcccctgatacacttagagaaattgataacagactctgcgcttcttttatggctcagaggaggcaactccaatcacatcactattggcaggcaatattattttttgacatggttgtaaaagtataaaggggcttatggcatttgtttagatgaggaatgggctctcaagctgtgctggggtttacaggaccagatcagtgagaagcaaagggaatatgatgtttgcaaacaggatatgattttatataagtttgggtttcatgctctgttccctggggaaagccctgcagacagcagagaattccacttttatcctacagcagacaagctcccagggccaaaaggcagaaaaataaacgtggtcaatgggtagtgtcagacccttgattggaagaggaggagctgtggacgagggagaacaatcccctaagaggactgaggatttgcagggcacgggcagaactgggacctgactaagtggttgaagatatgcaaaaagaggctctaaaaggtttaatgaaggcaccttctccagcagtgactcagtcaatctgtgaacacaaagctagctttttattacgacttttactctgttcatattctgtttggttacacctagatctgacacacttaggaatgtcatttttgtgattggggaaggggagatggggagaaggattaggtgattatgagagggtagtaatttaaggcccatttcaattgctctgaggttttctgcaaacgtttcagttgtatatcaactatactcactacgcgagaggcagatttggatgaaatgtcttaaattttcttttatcttgtcagaattaaaatgtaagctctcccctcttatttataaatttacagatatgtgtgtgtgtgtgtgtgtgtgtgtgtttatatatacaagaaacattgtatatacacatacataatcaggagaaaaatctattttacaccacatgtgtatcttcatattatttttctaattattacaccacattggtccttcacatttattctccccagtaccagtaaatagtattctagtggcaagccctacaaagagctgctctggtgtttccctccattataatactagggaatggattttgttttatgaccacatctatggacatatagttaaactcaatgcgacaaaagcttggttaataatgcattttactgctgtgatttaggatggtcatctttgaaacaaaaccaatattttcaaagccataatgtgtgccatcagataaggcatgaagggcaggaagaataagataaggcttgttgttgatgactagacaaggtgcagcrtgcaaaaacgaatgagcaatgagacaagaccactgctctcaatctcaattgctcacagcctagccattgggctggttcagaaaaatgctaagctatgagagcacagagaaggaagcttttaaaacagcaaagaaagaatagggtgtggaggttactcaagcagttataagctaaattttcaagaagaattagcaataaatgtgtgagttgtgtgttgggggtggtatgaggacaggtcatgggaggcagccaggcattgactgttcaggcaatagaacacaccgtatttctgacaattgcaccaagctgttgccaattagtagagaatttttttcttccaaaaaaggagggaaaaaccccaccttctgtttatgccaaaactttgcatgttcctgaggttttgatattgactcaggaacctctttcttcatatgttatttcaacccaattatcctgagcaagcacaatgccttttgttacatcagcagaaagaggagggggtagcatctgcttctcacatgcagtaatcagggtaatgttaatttccctcctattaatgttcaactcaaacctggcttgcaatcagtacttcatttcctccactgttgctatcaaaraggtatcacaaactttttccctccagcacaataaaaggatccaccctgatttagaatctctcttttttatatctcctcttcctaactgtatctggattttcatcagcttcagacttgatgcaattgatactagcaagaacaccccatggcacctggcaaaattaaaactgataagccaccttaatgaaactgagaatttagtttcatgctgcaaattmtgtaaaaagattatgttgcctcagacttcgaaaaaatgcatgaaatattattaaartcagggaattccttctaaattgcaaaggaagtttccagtattgcatagattatgctaattgtgtatactcaataatagttgttgggatgtagacaacactccctacagagatacacatgtatacattactctgtgtatgggacaaaatgtgaaaatacatagaatcattaagcatctaatgtccattgcaggaaagaagaaaatgagagaagaaaaccttaatttcctccttaattcacttacttgcagcatctcatctgtgattaaattctttctattgctttgacattatggctaagtacaacgagatgcattttgaaataagaatacttcattttcttatttaaagtaaacatgaatatcacaaagctgttaaaattcttctgttgccaaaatgagatggctaaaaaaatgcyatcatcaaagctttatttgtgttttttacattactggggccataagacctatttttttaaaaaactgtatacacacacacacacacacacacacacacacacacacacaaaagcacctatttccaccaaagtaatgtcaataacagggaggaagaaaacgattatgaacattgagacaagaagaaattcagccttaggctctgcagttgctgaaggtaaatggatttgatgaaatttaaatttctatctaacttagaagatctgtggctcgattaaataaaagctgagaaagtaaaacatacttgaatagatttgaaaatatgatcatctactgattgctacttctgactgccaaggagacgttaggcttaaatcaaatgaaaatttagagtagacaaaggaaatggtactacctaaaaaaaaataattcttgtagcagcctgaaatacagctatattcaggcacacctaagcttttcattttaaggtgaagtaacagcatttgtatttttcatctgtcatatttccactccgaatagttagttccagatccagatattcacccccgtaacaaactaatattcaatatgtaaaactgatgtgtcattattggatttgtctttgtgaagtattttaaccacaaacttagtaaagcataacttctaaactttcattaatggagaacaacagtttttttttcaaaattcaaaaccaaaataaattagctcactgaatgcttgagccataagcaggcagttcacagcagaatccctaggrtttaatcattccccaactcaagaaaaacccatagcttctgagttttagactagcagtatcattattgctatagagtgtcttaactttaaataaaaaataataagtaaaataaaggaattaaatgactaagcaatgattctcttagcaatagagcatgcattgagtcattatttctatgaagactgataagactattaaaggactaatatattcgatatttttatgctcctgaaatcatttggtgaatttattctgttatattctaaatattatgatttatataatctctaattgatatttactatggatacacacagacataccttggaaatattgcagattcagttccagagcaacacagtaaagcaaatagcacaataaagtgagtcacacaaatgttttgtttctcagtgtatactraacttatgtttatactgtcctgtagtctattaagtttacagtagcattatatctttaaaaatgtacataattttaaaactatgtttaaaaatcctaatgatcatctgagccttcagtgagtggtaatctttttgctggtgcagggttttgcttcaatattgagggccttattctggataaagcgttggctcaagggaatgtggttgggttgatcttctgtctagaccactcaaactttctccatatcagcagtaaggctatttcactttcttagcatttgtgtgttcactgcagtagcagtttcagtttcctttaaaaacttttcctttgcattcacaacttggctaactgttgggcacaacaggtctagttttcggcctgtctcagctttcaacatgccttcttcgctaagcttaatcatttctagcttttgattgagagtgttgagagtgagagacgtgcaactcttccttttacttgaagacttagaggctatcgtagggttattaacttgtctaatttcaatattcctgaatattagggaatagggaggcctgagaaagagaagagatggaggaaagactgatcggtggagcagaagtcacacacgatatttatcaattaagttcactgtcttatatgggcacgattcatggtgccccaaaacaattataatagtactatcaaagatgactgatcacagatgggcataaaagataaaataatgatgaaaaacttttgaaatattgcaggaattaccaaaatgtgacacagagacaggaagtgagcacatgctgctggaaaaatgacgcccatagacttgcttaacttggcgttgccacaaaccttcaatttgtaaaaaatcaaagtatctgaaaagtgtaataaagtgaagcacagtaaaacaaggtgtgcctgtatcgagtatcttcctgacgatctgtaagcacttctcaaaatgacttgtatcattttgagatgtgaccatttaaggaataaaaaccaagacctacaagtagcgaaattctttgctgctaaatagattacttttctttccttaatctattgcctctaaagacaatttaccatccattcattcattattaaataagcatgtactgtccagtaccatcctatgtgctaagtgtgaagcaacatgtagactcacattttttcttatgttgtgtttttttttttccttttcaattcccactcatgtatcttgtcatacctatcacttagactctgcattgattttcttctattcataattgtcaactctggtaggaaaggcctgggagttcataggactaaggacagaagatagtcagaatatccatactcagttgaamcagattcaaattcagtagtctaatgaaacagttctacgagatggccttcttgtctcagctttctttgatgggggcatccaattttttgtytgtttgtttgagacagggtcttrctctgttgctcaggtgggagtacagtggcacaatcacagctcattgaagcctcaacctcctgggctccaaagatcctcttgcttgagctttgttaagagctaggaggtaggaatacaggkacacaccaccacacatatttggctttctttcttttattttgtakagatgtggtctcactacgttgctctggctagtctcaaactccctgcctcaagcaatcctgccaccttggcctcccaaamtgctaggattagaggcctgarccactgtgcctggcaaattctcattccaagagctaggaagcgcagtatccagcatcaatccacaactccattaatagcaaatgtggaagaagttcaaagaccagtgctcactggtgcagactattctctgtgcttctgaacttactatactcacaatttccaattttcacaacttgggacagaattcatttgctcacttatttagtaatttatttatacagcaaatgcttattgaatgcctattgtatgcctggaactgcaaatacagtactgaacaaaacagaaaacgttttatcctactggaacttatattccagttgaggagacaaataagcaagaatgaatgactttaaatatatgtgcatgtatgtgatgatgatgaatgctatagagaaaaggaagcaaggaaggggtgtggagtcttgtagtgttggggcagagaactagtggttaatgagaagtgttgcttttttggatattaggatagacaggtgaggggtgacctgggagccctggtttcttgtggtgactgacttaaagaggggtacagagaataataagatccatactgagggtgcaaagcagagtggtggggaagcaaggaaagttcaggaggtggagaggaggcttgccaagactgctcagagtttggggaccccatctcactctcactgttaaagatctgkgtgtctagaggtagggttgttctattcagaacacacagagcttctggtcttccttctgacaactggattgaggtgtggcaatagatgatgagagggcaagttgaatttctaggcacacsctgagatgctgacatttctcttcagagctggctatggaggtatagagaaggttgggggtgggggcacacttactcaggcactcaaagatctgggactcagtagcaggccctgggctgtgagatatctctctgggtagttccagatcttagcagcactgtgtgctttggggttccaagtccctggaatgttatgtggacatacttttctttttaaattgggcagctgcaaattatatacagtactccaacacctgcccattttcaagtctaataaaaatgtcctgacatttgcatgacctttgcaagtgggtttttttccttgtgcattttagtgtcttcttgaatgacattgtcacattatggcctcagttgctctggctggtccatcctgatttatatctgaactgtgagatttggggtaactgatttgttggtcccattgtgttggtgcatagaatggaccaaataatgatgacgtctcaatttctatatgcccagtttcgtgttgtatttatatagtgcaagagagataaaagtctgaattccagggtatttttactattgacaatcagtttctgatcctcagcatcctcaatattaaatgaatagaatcaagaaaaaaaacttggctaaattttttaggattatgctttaaccattttagcaaaataataattctcgrctttgaccccagtggtattcagaggatygaccttaatgatgggattatccatcaagtaaagggacaggtaaggtgccctagattaggctgggcaatagagaatcctgcaaaacataccctcctgattctcacagaaccaagagggctgattcacagmctcacagcagagactagccattctttacacaaaccttccaatgataacctgcctcaatctcttttaaatcccaaataatcccagaggttttattgctaaagatgcaattgargtttcctattctacagaaaaggaaacaaaggctcagagaggtgagtatcttgttcaggtcatagaattagtaggccatggagcagagagggcctgattcccaagcttttaaccacaatactatgcacacacagcacaactcaccataatttcaacctcatatgattgtcaacactcctttcccaagtgagaatagccctagccgtaagaaaaaaacaattgctatttttgccaagagcattctcttttttattgaaattcctatgaagtattaaatccatgcactcaaacatcatcaattctgggtaaaaaaaaaaattacacagctatacatagtatttcaaccctaactagaacactgaaaagtctctgtccttggaccaaaccactgtgggatgagatagagagaatctcatttcacacacctactgagtcagagttaattttattaagctrcactctgtaggaatgaggctctaatgtgcactgtccagtgaataaaaagattggcatattttgaagcaccctttacacagtgtggacatcagattaaatgaagaaacagtaggaaagtactaaaatggtatttcttggctctgtctctaactcagtcttggtagaactgaccagcagttcactgaaattggataacaatagggactctcaaattcctttactggtctttactggccacataacccacaggaatccatatattacttggtaaatctatgagtcccccggatcttaagtaaggatccttagagtctcaagatgtagccctttcaccagagcaaacatattcctctccttattcttgttactggcaagtaaatagcaaaaggcagatttttctgaagataaagagtgactagaaattgcacatgcaaggtcaatggagctgccagaaagcagttgatcataccgggagatggtttgtggtagagcattaatgcacatggcatgccccttttctcctccagctgtcacattaatatttcacaccttctttccatatggaatatcagtcacagtattcattcatcatatccatggctttacttggaatctgaacgtcttccctgtagctgctctgtttctttttcatctcaccatgactaaagaagctaaggtgtgggcattataacctacaactgatcccaaaggaatgggctgtcattcatgtcttccttccartgttgaacaaaagagagaatgcatgtgggttcacccacccattgttatcataaatccatcccagctccatttcaagactctcagggtttcagcagaacatctaacacgaaatgaatatatacattcaaggagctggcatgttgtatcacaagggagaagggaaaacacccattgttacagcctcagagctgattgaaaaagaatgcaataaagaatatcagaggttctcagaccagaatcatgattctcattattatcccacaggaggagaaaagggacagtcacccagaattagagagggctctagaagttttgaagtgttgacacctaagcgtccacaaaactgctcggaatagttttattttagaagtatcctgcccagcctgagtctgagaaaccagcaatgcaaaggctctgttaattattatttcacttatctgagacttggtttctttatctrtgaaatagggctaagcaaggctcccacatggtattattgtgaggatcaaatgtgataatgtaggttatcactggcagctatatgtggtaatgagcactgcaccaccctgtggggtcaccttgagtagattcaggtctgcagagggtaaacagactccctgatttaaaggttctccaaagccctgcaaccctgaggtctccacctgacctacctatccaactaatagtctaccattagaatcaaggcactgcagggagacaaataaagggagggaggacattgctttcagaaatcccagtgattasgcatctaggcagagagccttcatttaggaactcyggaatctggattcaaatctttacgttgtcactgctccaaaagcgctttttcaactctaaagtgcagattccaattcagcaggaccaaatgcgagctgagattctgcatttctcatagcactcagggatggcattgctactcatccgtggaccacattttgagtggtaagatcctgtaagaccatggactcwcaaatcattgaaatgactgggcctcagttccttcacctatgaagtaaggtgataaatgaaatgtgatttattgtcttctctggggatcaaatatgtcattactgtgtgatagtactttatccaaatttaaaacagctttttacaaaattcatttttcttgagagatcagatagcaggctcccattagcttgtcactggggatcttgttgacttaagtcttacacagtctgtctcccttgggaaaatagtgagtggggaagyttctgtgagagacaggggtgatgcatgacaacagagatccagggcactggggacatcacagttgttgtyggatgattcagtgaagaagcatcattgtaggatgatgcaccaaaggaagcacccaatgctggcaagcaagagctagtaggctatacctggtgcagactgaagatgagagaagcagtcatcactacatcatggatgtattgcaggrcccaaacaggggtggtgtttggagtttagatagtttagccacagtaaagccctgyaaagaacagtatcactataggattctttkgttctcatccttaattcattccctcgacaaaatttgttaagcatctattatgtgtcagaccttgaagaaagagcagtaaagacagacacccataaccctatgcctaggacacttgcactagcccatygtgttctaaagaatcaacaacayagaayatctttttaaagttcacatctgtatttggctagctagggctgtcataacacaataccacagaytgggtggcttaagcaacaggaattaattttctcacagttctggagcctagaagttcaatatcaaaatgttggcagatttgatttctcctaaggcttctctcctgggtccttggatgaccttcttctcattgtggcctcacaagcttttctctgttcatgcgcatccctgctgtctctttcttttcttataaggacatcagtcattttgtattagggccccacccttatgatctcatttaaccttaattaccttttcaaaggacttattgattgctgaatacagtcccattgggcttaggacttcaatatgcgaattctgaggaaacacaattcagtccataacgatattaatgtccagggttggctttggttgaaaccccagctcttcatctcatcaactatataactttggtcaagttacttaacctctttacagttcagtttactcttctgtaaaggtgactaataatacttttataaagctctcatgaggaattaaataggtagtgtttgtaaagtgcttaatagggtccagcacctagtaggtgccccaatcttacccactatgctgttctttaaatactgaccaaagatatttactttttgctttctttgggcaatagatttgactttattaccttttcttgtgaatctactaataaattaggcttttctttttcttggaacctcgcaactcacaccccttttcttaccatttccaaaaacaaaatatctactggaatcatcagctttagccctaattgtaaaggatcaaggataggaaaatgttgagcttatcaaataccacttaggtgggaaaaggtaattattttgtttcccaaggcaaacacaaaaagaaatttggcattagaagatgaaagtagataatttttaagttaccaaatcaagatgctgtttgcagaaatatttggtccacagtagatgattcatttaaaaaatacactttacctgacacagtgcaaaagttaaaatgatttttattttattttgcggtttagctttaatacaacctgctaaaatggcacagaatcaatactgcaatgaaaaacctctgtttctttgttgagtctggtgtctgtcaataggtttcyaggggcatctgatcattatttaagcttaaactcaattattcagaaaatgccctgtggccctagcrtcagcataaaatagcagcaagaccttactaaactgctcagaactgggtgaagagtttcatttcccaactttcagggtgaaatgttcaaggcatctgaggaaggatagtgtaccacattaaacatgcacagtgcatatgaaacctgttttgttaatgggcacaatagtattatatttaactctgggaatatttccaccaggaagcaacaggctgcatttagattatacaaaggagactgtgcctaaattccttttcttttaagtcattccctttccgttttaaataccttcacatccactttcaggacaggtagcttaatttctatcatgtgcggcttttcagagcattagctttgtttcagattccaatgattgagctatgctggatgtgcttggaaaagcctgcaaagacccacattcactcaggaaactacagttgaactagatccatatgtggctagaaaacatgtagctttctgattggaggtagttcctggcttccagcattatcacagatgatttttgtcctttgatgtgctgcgaaatagaaagtaatgttagaagcaaaatgcggggatttttttttcttagttaccattgactgagagcttactgcttccagcatcgtcttgtgctgtgttaagcactttatatgtattgactgattgaatgctaacaataatcctatgaggaaggagtattattccatttttcttaggtcacggatcggtgaatgaacttgcccgtgtttgaatagtttgcaagtggaactgctggtttacgaggtctctaacgctaaggcaacaaaatagataaggtgccattgcaccaaatgtcaatgatgtccttgccaatgctaccacctaaaagaataggataaagtagaggaggatttgcccaaagcttgcttccttttaatgtctgtttaaaagtatatttaaagcctaacaatttctcgaaatcctggggttawaccagtctgtaggtaccaaattttggtgtatgactcaaacaaattattggtagtcattctctcttggtacaatttatgttgataggtgtaacttattaatacaaattcctaaarcatttctaattttacttctggcttcaccttttctttctatccttttatccaaatagaactctttctttmaacagtttgcaaagaaaagcatttctctatgaagttaatgcttctcaaattattatgyggtaaggggcaaggttttgtttacttacatttcatttcctatatctgttgtgaagaaatacttgtatatgaggcaataaatacaaattactaaaagtgagatacaaaagacatagaacataaaaactccagttattttttattagattcaacagatcatgtctggccttgtcctcaggcagaggctggaatccttcagtaacacacctctgtaagagttagaggacttctattctcccagggcactgccctgagaaacctccttgaattaagctttgatggttaccacacaaggaatcaactcaactagttctgctgagactttttttttttttttttgcctttcccrctttagaattttcaaactttgtgtgaaaataaatcaccctgggtagcagaagttatgcactgccaggccagaagccatattcaacacatacatagatttctcttagcttggctggggatttttaagtgaattattgtcaatatttaagatagaaaaattgcacctaagaatacaatatttagggctactaataaataccatgctatcatttccttaagacaaaaattgtttggaactgtgtagccatkgtccttttagctgggacacaaacactccagtcaaccatagttccaaccagagaacctgtccctcatccccagttacctgacattatgtctatgtccccattgtggctttcggtgtcatttgaacacgtggctacttctttagccctaatctgtaccccttctatattcgagtctttctgggtattattattattattattatttggtttttgtctctgtctgtggactcatggacactacttgattccaatacatataagacaattaatccctttaacaccaaggaaatcctctcctctcctctccttttcttctcttttcttttctttcgtatctcaccttgttacccagactggcctcaaatttctagactcaagtgatcctcccgcctcagctttctgagtagctgggtctgtaggcacacaccaccaaaagctagctcaagaattttttttttacaacctagtaaacatttaatttattcctgattcaaatccgaggaggcattttagaagagaaggttgctactattgctctcagtgtgaacaataagaggacaaaacaaaaaacaaaaaacaaaaaaaaaactgaaggccaccaggtgcttgccccagacatttgcagaagcacagagacttctggataggagagcactcaggaagcatctttatgttcttgcaaaatcctgagttggtcatgggtttttatcattttaattcatgttcttaactcacagtggaataaagaaatggtgtaaacaacggttttgaaatgttatacccatctctcagctgctcagaatctgtttcaaagatagtgaacaattagaagggtgggttactcagaatcagtgcccacatatatttcacttaacagaatgaatcatggccactcaaaggcagcagactttccatgtactcccagcctgccacgtgtgtagtatgaacccaacattctcatgaacaacagtttctcaaaaacttggcttttaataggtagcaattgcttgtgtgtgtgtgtgtgtgtgtgttgtgtgtytgtgtgtgcatgtgtgtgttttgtatagactcataaattatatgatgttccttgaccctttattttgccaatgatattatataattatttctttttgaaatcatcagataaaattgcagtactttcctttggcgtattaaggastggtaaggtgagaatgaagcaaaggaatgggaagaactatgaagagtttttactggttctgtcactaacatttgtgacacttaagaaaccaagggcagaacaatgcttaaaaataaatatataacagcattgattctgttcagtagacagaattatttggacaaattcagggaaaggacactgattaaagttatttttggttgtataccaaaaaaaaaaaycatgcatygtaggatgcgtagtggcattcctggctctatgcactagaagccagtagcacacctcccttactcagtcatgacaacaaaaaatgtctccagaaagtgccaaatgaccccttagatgcaaaatcactgtcattgagatccactgctctaccataatagcagacaaatcacaacactcaagaaaagctcaactcttctaggtaccacttgaaacatttgatttaaaaaaaatattttagcacttttaacagggtagggtttcaataccgtgaaagaaaaaacattcttgcaggtcttagctaatttatttaattagaaaactctttatgcatatatgattagaatctgttttttaaaataccattttattatttattttactttttggattttgattttactagcataaaaattactatgggctaacagctcatagttttctcagttctttttctaccttctctaattactagctgaataacctctgaatttcatatataaaactgcttaataatagcatctacattaatggtcgctgtaagaattgtattagttactatgggcaaaagctttgcacagtgcctggatcttagtaaatactcaataattgctagacaataatattattgttattgtcattattatttctaaataaaaagaaaataactttatagagtagggaagtatataataaaactgaaaacatggactgttaaattttagttttttattactttctctatgtattttctgaattgcattctgctatgactgagtaaacgaaatcatgtttctgctattcatgttccctaagttatgtttaactcagcactcatcctttttatcccttattctggatcaccactagtaagagagattgcaacatgttattcttcttttaaatgtgaacagcattatgtagtagctaagttttaataaatagatgtataactagcgctttactggccctaactctttatcctcttgtagtccctccatgcctccatagagaggagtatcttcctaattattttaggagcttcaggtaatgcctaatgtgaatagtaccatgtgcttctgaatgcaagatgttttttcccatcgccctttccttccttcctttcgtccttccttcctttcttccttccttccttccttcctctctctcatgtactttttgctcacatacacttcctgtgtcccctgtttctgtcacacctcttgggtatggctggctggcttccttccttccttccttccttccttccttccctccctccctccttccttcctttcttccctccttctttcctcccttcctcccttccttcctttttgctcacatatccctttctgtgtcctcggtttctgttgcatgcgcctcttgagtctagctttctttccttccttttcttttttctctctttctttcttttctttctttctttctttccttccttccttccttccttcattccttccttccttcattccttccttccttccttctcttttctttctttgttcccagtgagtactgctggcccctgctgatgcacattaccgatattctggggtctttacattgccaagtgctcaggattctatgaggtttatagagaaacagaaaatgtgcttccttccctcttttaaggtcataatttttcaaattgataccaaagtgttctacgtaattctcatgyttttagagggtttaaaatgytttgcctattttagttacttataatctcctgtgtttctcaacccctttctaccctattagatagacaggactctgggagtgtgggttgggagagaatctcaatragagattctgtrctacttcagattgtgcctcctcctctgatgactaaatctttcttatgggccaagctcctgtgactctcaccctaaagtggggttctactcaatctcaccgagtgtgtttgttccctcacacagaaagactttttgtggaatagcttcacttacacttctcaaccccagttttggatgtatgttaggtccagaccctcctacatatttataaagtgagttgaactttgggatgcctatttcaaaactgatagattttaattctggcaataaaacaaggcctctgtggacctatttctcagcagactactaaagctgccttcatgcttggtacattagttacatcattagaaacatttgaaagttaaaagcatactgtttttagaatggtacataaagcaaggcttggtaaagattccagaggaatctgaaggtaggaatatttagggatttccatactgtaaaatacagttaaacctcactagcctgtgtgtacagcatatccttagagacttctgcccagaatcctggctagatttttatccctgccatttggcaaaataaattcctgaccttggaaataaatgggacacaatatttcccatgctccctcagatgtgtgatgaatatgttatttattttttctcccaattatagtgatcctctccataattaataatctatcagcctcttccagtttgaataacttcctttcagtttagaaatactgtcttttcaagatcaccttattattggacttaatgtctttaggtaattgcttagcctctcagattcctctttgaagatggcatttgggcacctgagggagggatggagagctgaaggggtacctggatcctcctgctgtcctctgaacactcagggttccatggcaacctctctgcaccacctgactcttcctgaagttgaagctgaggtcggcagcagattaactcctgattactgacttctctgccagctggagcttggcagggttcccgggctccagtagcctccctttggctcacattggtaatggggttcctctgaacccctctgtggactccatttggctccacccatagttaaaccatttcacaggctctcccatatcataccccttggaggattgtgagaacttgagacttccagctgcactctacaggaaccaagagcatctcaggaatgctgtagcttaatcttccattagtttttcataccactctgcagactttattatatggtggccacagtttagtgtagacatgacttcaaaaagtcccaaatattggctgaaygcggtggttcacacctgtcatcccakcattttgggaggctgaggcagacggatcacctgaggtcaggagttcaagactagcctggccaacatggtgaaaccccatctctactaaaaayacaaaaattaactcagtgtggtggcggrtgcctgaaatcccatctacttgggaggctgaggcrgaagaatggcttgaacccaggaagcagaggttgcagtgagccaagatcgagctactgcactccagcctggatgacagagcgagactctgtttaaaaaaaaaaaaaaaaagacccaaatatcaaccaaagtgaaggctcaccgaccattttgtcaacttacctgaaacatttttctctctcgtttgctcacatgtcgctttctgtgttccttgtttgtgccgcaccccttgagtccagctttctgcagtctttcaggaccagaagagatggattttaggttttccttccactcaatgtattctatatgtaccctaatcaacaagcatgcctggttgtcacaggtagaaggggtctctactctgaatcattcagagaagaaataatcatattctttcgatgctatcactaacacaggaccgtgatcygagacaaccaggttcagttcttgatatgtaaaggaatttgggaaaatatcatctctcaccacaaawtctgtatttttatgtatatttaagcaaaatcctgttttggtcatcattttctttacctttcttctatatccatcctaatctccctttcagctcatgtactattactccttaatgcacacgcagacacatacacgcgcacacacacacacacacacagtctctctctctctctctttctccctttctgtctctcactgggaaaaagaataagttgttggagagacaaaggagaatttatgtgcatggaaagaaaaatgacaaagcatattttttcagaatatagtagttctatttttaagaatttgccttgcatgtcttctcaactttagcaagaccttagtagtaggccactgtgctcagggtggctccctgctccactgtcatttatttcctttccagcctcatctattacatcttgcattatttttccatttccagagccaactttatgccactgtccttcaacttccaaatgtgagggtgcctgtcttcttatagttccaaacccttctgatctctactttcatcattattgcattgccatttcagccccttaatcctgcatatctgtatgcattccaagcaaatccttctttcccttttttcttcccctcmagctccaaaatatcttattctatgcaaggaaccactatcagttgatgaactcaactgttttctcttacctatagttttttcctactgtcaagatgttcttcagcagttgaaatcagagctctcttaaggaagtggccctcttgatgctatcactaatatagggaaattggttggagagattgacaaccaatgagagggacaaagagggaggaaaaatatttttaccattgagaatattggaaagtggatatrgatgttcttctagtgacacagattatagcataattcatgagttatgtatcctgttttatcattgaagttcttatgaaactgtaacatggaaaatacatgtggggagcttttggcagctaatttggccctgaaccccatttggatcatcatgccttaggaaagtatgcttgtaatttgacttatgaacaagattttgggatttaatcttactatgaactgaagagtgtgccctcaaaatttatgtactgaagctcaaatcgctaatctgattatatttgactaccttttgaaagtaattaagattaaattagstcataaggtactgtgtgctaatccaataggactgatatccttacatgaagaggaactttagtacaaggaaagggcatgtgaggatgtagcagaaaggtggccatctgcaagccaagaggagagtcctcaccagtcaccaaatgggttggcacctttatcttgaacttcaaagcctccagaattgtgagaaataaaatttcttttgtttaagctacctaccccttggtattttgttatggcaacctgaatggacaaagacaaacttktttgtaaattcagaattaagtacaattacctatttatgaacagattatatccacaaaacttgaccattaccgtttataarcatttataaactaaatgtargtaaaacataggttgaggtggtattgagataaatattgtttttgtttaaatataaataaattaatggatgataaatcccatagtttcctaaagagaacttctttagggataagcctaaacattggttatgagtcaaaatatcaatcatccactggatacctatgtgctyaacattctttatgatcaataaacatagctttattataaaagtaacccccacccggcaactcacagtaggtactcaatgaatgttaactgaattaaaacaaaactaccattattagtagaagtttagacaccaaaattaatgtcacaaacatctttggcagatagaaaggtatggacaggcatatgggtatcacgcaaacgtatttgtggctacctaatgccctttagtatggtcaaagatacagcactctctgctgctggaatgtttttctaatcaagttcagtatttataattttttggaaggaaatttgccactgctttaagaaataaagaaagaaacaaagcttatgatgtactccaaagttgagtaaaaagggcttaggaattttacatggttcttgagtcaccgaatacatcttttggaatttatttattttatytttttgcttgcttccccagtaacttaaattctgattaatgcaggcttttctttggtactagtagctctgtagtggtgggaaaactgactaaaacctatataatacatggtaaataatggtttttatttttcaacttgtgcagtcatcttccttaagaatatagctacacaaagcttaaacaactacttatttatattggttcagtaaaataataaaaccttcaatttagagggcaaatgattaggtctcagtgtccatttcaatgattccttcactctttagctgacagtgcagaccatgatggtatcgactatgataggggatgctggctcctakaaagcacgggtttcttcaggagggtgatggaaaggcatgtgctgacagggtcagagttctgtgtgagagtcccgtggtcttcagaacagcctttctaagccacagtgtactcattcaatcaacacgtaggcctctactatgtgccaggctttacaaaacaggtataacagtagctgaaatggtagtagctagcttttgyttaccacttagtcatttaatcctcactaaaatcgtatgcagatggtactttaaaaagttggtattttcacagataaaggaaccaaggcacagagccattaattaattaattctccaatgtcactcaggttttaatgatgaagccatgattttaccccaccagtttgattccagaaacttcactactatactgctgtttataggatcttgattttcttttattatgtatgcacttatttactgttctcatttattatttttgtattcattgttcttggtagtatttaagtgtgtmagaacctcatgagaaaaaggcatgtgaatattcttagaaaactacttagttcactgtgaatgtgtgttgttattatttattgtatttgttccatgtgattaggccccttgcatttaatkctctttttttttttaaaaaaaaaaaaaaagctttgttttatgcagaatttctcccctttgatccatttgggaagtcttgctatttacagtcacaaactttgtattctatttcctggtgcttcaaataacttatgtgtcctaaaattagagacttctaccatctggtactgtttttttatgttatgaagtattttatatattaaaaatataacatatgataattataaaccaccattgttgctcttttcatgtatgcattattatgtgttttcattgcattcatgaaaaagggtaaacagcattttataaagggaaatccagaatattggtacatgctttgttttgataataatgttctctagtagataagcaaccatctattttactggcttatccaattttaacaataccagtttgaactgaaacaatctgacaaattatactgaaagttagaaatcttaagcttatactttgaacatcacatttctccttgcaatttgctgttattgttttaagtgtgaggaccacacactccttccatttagttggagaacctgacttgtggttgctactttctactccctgactgctgctgctacctgcctaataattgtgtttggctccctgtaaacctgcagtcagaaaggtatttgaattttccccctctagcacttgcaaatccgatttttatgtataactaagtgctcttagtttttactctatctactactggggcctggtttctagcaggcctgtaactaagccagatccggcctatgtaatgctgtttgtaatgagaaatctaaacagggaatggcagtgaggcatggcaggaatgtgtttccattggagaagtcagtgtagagaaaaagtataagcaaagccatgtccagaaggccttttcagctggccaagacggaagactaatgttattgtacataggctgttaccctgccagcccttcctcacagatttgctttctctctctgtccctcttcccctgcgacctcttccccttttacccctttcatctcttccttctctttcgctttcttcttctgtcttcggactctgctgactgtttgctcaggtggacagtgacaccatttggaatgagctacactcgtccggtgctgcacgcatggctgttggctgtgtcatcgagctggcttccaaagtggcctcaggagagctgaaggtgaggtccgggttgcattaagtgtgggaaatccagagaagaaactgaaacagagatgttgttatgtgggaattgcggggagtgtggcgtggtaataaaaggaagggcagaaggaagagggtagagatggccactaaggtgtgataataactcatctgtaggcagggagcagctcatcctgctctcagggccttcttctgcctgagaacactctgcagtcagggcccaccggtgtgcatgtaagagcacagagataataagcaaagctatggttcaggtwaaaaatacctttagtatatacatgtctgtcatgccatcctgagattctcttttgaggcaattttaaaaatatgattactgagaagtgtgtataagctcagaataccacccagagagagggaggcagagaaaggtaaataccagacgggaaggattgggaggaggaaggaaattgttgattagaagggtaatgatccagagtgtgtttttccatgaaagaacttaaaaaatgagctatgctttattgttcttttctttttatggtctcttcttttctacatcgtatgaaaagaacaatgtccaaacccyagcgtttcccagtctaaacaatttataaaagctagagacctgacagacgttgacattttatttggtattttaacagtgctatttaaaggtacgccatgtgcgtcttgaatgcagttaccccaataaactttgttggtgctaacacggccttttaatgcactarttcacacacttcatgacgcaatctgggtcgtgattgattcggtatttttagcaattgcggggcttagggaaatatattatgaccaataacatatgcactgtgagttttgtgaaaccaagataaaataattaggattacttttctttatgtctagtgaatttttattcaattacatgggactcttccagttgtgattaaaaatgtggagtaggaatgtgcacttcacaatgcaacgtttgtccaagaagtctttactcttaactctttaaagagtcagagcctacggaaatataattttgatagggtgagctctatttaaaaagtagatgtgcctgtatatatttgacataagtagtattaggacattgctcatctcaggggatatatggggtcattaatgtggtgcttactcttcagtctttacctttgaaaatgagcaaataaaaagaggaaaggaatcagcctgtggagaggttttggctatctcccagtagaacttgaggaaaaattcttcctatttgagtgcttgtgttgtacttgcaccacygcaataaattaacactttaaaataaaatttgaacatcttattttaaaaagaatccaaatggcagaaatcagccaggccacaatattataattttaaagattatgctggcacagctctttgataacaaagataattattatgttagctttcacaatttcyaattgttttaagtttgtgtaagtttaagcaataattcagaaaccttctcaagtagaatgcccacgtgtttcagtcatcagaagcatcattattagcttcactgtgtgcagaattgccaaatatatgcacgaagatagttgaataaaaacataattccatgtttagaagttatccatttaaaatagccagttccaaacaatgtgtcaacaacacatagtatgggcatgctgaccaccagctgtagtaacatcaggtatttatattragaacaacgattggtacaaatttcttcccttcctctggttaaggaatcagcaggcatggtttaaaaagaaaagaaaacagtaaaaaaaaaaaaaaaaaaaaaaaaagaaaagccagcctaagaatcaagaaatcttagtccaggttccaccacttgcatagtgtgtcatttgtggcaaatctgtaacttttctggggctcaatttctggttctgcacaatcatctaggtggaattgataatattgaaggtcatccatggcactggcattttgagctatttgcaaatgaaaagtggatatgaatctcaattataacactatggcatcccaagcggtagatattctgaaatttcagtttgctttgatgaacattccagattgtgcagctgggttatctttctgattgccaagtccattgtaaaagtccaagataggcagaatcataacagaggcactggtactatgctgacaggtcaagagactgaagccctgggttgctaataatttgggtaaggctacagagatgccatgggggaaaagtagaactcacaaatgatttggagccatagtaaagaacatgtgtaactgaggtagacagccatgtttgtggaccgctattcaacaaccacaaaaactacccagtgcctacgtgtcccagactcaaatatgatggggctgatatacctgcaggccaggagcattattactcatggtttgtggattcgattcattcagaacttggaagaaaatagggaagcttattcaaggacactggtaagtaataagaaatgtgaaaagaaaagacttgagcattttgttattcatttttctgcatctacattcagttctcacatattctatcccattctcccagtaaatcaacatttaattaaataamattggcatgttacgataccacatcgtatgagattgcactaatttttcttggaaaatagagtaaaattaagagctttatttgaaatatgatgtgcctggatatagtgtggaaataagagatgagagctagctagaggaggtctctgagatcacagaggatgaggacctaaaagataagaaatgtgcacaaaaaaagaaaatgccagaaaaaattgtatgactkggaaattttgtttgatgctgaacttgaccatggctaacctcctaacttttgataggtcctttcctttcttcccccaggggatattgatgagctgaaggaattagaagaatgaaccaggcacagggggtgggtttcctgttaatgcttaaatagaacatgtgcagcaaactatatcagcaaattggtatattttttggcacagcatagacctgctcagtggagctcagtgaaaatcatggggactttcagactttccargtttttaaacaatacatttttaaaaatacataagaaggaattcctcaaatttacaggtattcaaattggctatttctcagattctcttacaaaggaacaaaaatattctgaaattgttggcatgtttggtrtattggaaatcataattggaagaataattatctcaaaatggttttattgttttataggacattttagaaagtatgtcaaagacatagaaatagctctaaaaggtgaacattttgtaatcataaataaaaaaggattgatacttattgaartttaatataaagattcactttggtgttcttttgacaatgctaccatgtcttcataaaatagtcaaagttgcttttagcttctggacatatttatcaaaacaaacaaaaacaaaaaaaatcctaaacacctggttatctgagtgatggatgaatttgagcatatactgaatgaatatgagtttgagtgtgtattatgatgtcatgttrctaataataactgctactcattgagtgccttctgtaggcagccagtttatatgtaatttactattattctcacaatgtacccttgaagtaagtacaggatactggctcaaagacattaagtaaccttttaagatcctgcagataggttaataaataataaaatatgtaaatctgataatcctctgttttctttcaaccactctatcaggacattcttttacagatagcacaaatatacatttaaaaaaggggctaaaactatctattttaagtaagcaaaattttatcttttttattattataaaacatttgagacatacaaaaagacaagaagttacattcttacctaacaaaatataataataaaataaatacccacgaactcctcatccaatttaagaattgaactttgctcacaatattaaaattctctcagtacttatctcattcctatattttaaaaccagatagtcatwaatctattatatttttttaaattatggccctgcgcagtggttcatgcctgtaatcccagcactttgggaggctgaggcgggtggatgacttgaggtctggtgttcaagaccagcctggccaacgtggcaaaaccccgtgctcactaaaaatacaaaaaattagccaggtgtgttggcaggcgcctgtaatcccagctatgtgggaggctgagacatgagaatcgcttgaacccaggaggcaggggttacagtgagccgagattgcactgctgtactccagcctgggtggcagagtaagactccatctcagaaaaaaaaaaaaattcctttcgtcttgttaatagctttaaacatgctttttgctttataaaaatggaaccttatcgaatatattcttcttcagcatatttcccctaaaaggtatattatgaggatttatccatgtggagatatatatatatatatatgaatgattaattcattttcattgctataaaatattccctttgcaccataatttatatttttattcttctgcaagacattgttgttgtttccaggtttttgcttttttgaataatgctatatgaacacccttgaacatggctgctctttcactagagtataacaaagagtaaaacagtccgctcctaggctactttcacagtaaatttcaggaggtaatgccaagtggaattccaaagtcattttaccacaatgacatcagcaaagtgtcagtctaagagttcaaaaattcttttctccataaaaacaatgataaaacaggcaaaatgtgtcaggatgaaatttttcaaaactcaggaaagtaatcaaagtcttccaacaactcaggaagcatgtttcaaaaaacaaaccagctgaattttggtgagaacagagagatttgtggtgttttaactcatcgtatttccatcttcccctttctaggtccatggtagccttaccaaatcacagcctgcattcttagcataaactagtaacttgccaacctctgatggggagataagggagtggataatggaattggaactccttcaaagcctcaatcctagagaattgtcattatttgacctgtccagtgcttccctgcataacttacttgcaaggctttatttggcttcatgaggttttcacacagtgtgaaagcctttttcttagaagtatttgttgtgaaaaattagtggcgatcactcaactttatggctgcttgaggtggtggataacaatggggcaaacagtaggttagccaaaagcatcaaagaaaacctgaggaatgtgcataaggactatgaaaagccmcatcagattcctaagaatctagaaagccacatgtatgatagggctatatgcatactcagatttgtgttcctactcaggaaagacctgaaaaggccctaagctcttatgtcaaactgattttgaggctctgttcaaacaggaagtgaaggtccaggtagagttgtcagctgcctggctaaatatttaaaatgtgccctaacasacacacacacacacacacacacacacacacacacacacacagagcccctcggcaaaggctgggggagtgctggttttaagcattaaaagaaatatatttatccaatcattgactgaccactaagctaacaatgcaaagacttcagtagcatataaaacatagaacacagattttacacaacgatttcacaaaagtcactaagaaaatgacgataacaaaaaggaacaacaacaaatcctggaaagaggtgagaatatgacttctagttttaccatactgttttgtttaaaatgtccagttttccacagaaatgtttgagacaagcaaagaaacaagaaagaatgccccacacagaggaaaaacaaatcagtcaataataactgtccctgagttasctcagttatcagacttactagacaaaaactaagctagatatttttaataatttaaagaagtaagttaagccatgtctaaagattgtatgaggatgtatgactctataaacagaatactaataaagacacagacattgttaaaataaaagaaccaaggaaaattctggatttgaaaaacacgataacttaaatgaaaaatttactagaagggcttagtagaaatgtgagcaggcagatgaaaatgtcagcaaacctgaagatatctagtctgaagaccaggaagaaaagagaatgaagaaaaatgaacagagtttcaaaggtctgtaggacatgatcaaatgtaccaacatatgcataataagtttcagagaagaaaagagaaaggggaagaaagaatatttgaagaaattacggctgaatatttcccaaattcaataaaaacattaatcaacatattcatgaagctcagtgctccaamtaggataaactcagagatccatacctagacgcaccataatgaaaccattgaaatccaatgatgagaaaaaaatcttaaaaacagcaaaagagaagcaactcatcacctccaaaaatcctcaataaaatcaacaacttaggtctcatcataaactatgtaggccagaaggcagtgggatgacatcatcaaagtgctgaaagaaaaagaccatcaccaagtattctatgtccaacaaatctgtccttcaaaaatgatggtgaatttaatacatgctctgttttaccccattagtccattcacctatctctgaatcagtaccacatactactcattacttcaactttataagaggtcttgactatctgataggaaaaattttttcactttcttattcttcctcactagatcttgacattttctttgttcttaaatgtatagtttaaactcaccgtgtcattttgcatgaaacattccatgagaggtttttttgcattgaatctacagatgagtttgacaataattaacatttttagatgattgagtctatttgtttctgagcatatgtttacatttatttatactttctttgaagtttcttaatcaagttttataatttcttcttgggcaagggatggcggtgcatgcctgtaatcccagcacttaaggaggctgaagtgggtggattacttgagctcaggagtttgagacctgcctggacaatatggcaaaaccctgtctctacaaaaaatacaaaaattagccaggtggggtggcatgtacctgttgtcccagctactcaggatgctgagatgggaggattgcttgagcccgggaagtcaaagctgcagtgagccaagatcgtgctgtctcattccagcctggaagacagagcgaggccttgtttcaaaataataataataataataataatttctccaaagacaaaaaatatatatatgtaggtaatttgtgtttttgaaaagaattttagtggcatcttattacaattacattctctgttctgatgtacaaaggggctgtttattttttgctaattgtacatcattattattgcaaaactagtaacaatttataagtcatttggggtttctttctgatatcatctgcaaataatgacagttttatttctttttttccaataattatgccattttaaaatttgtatttccttattacatgggctaaaatctctgatataatgctgaagacaattgaacatggtgagtattcttgtgtctttctagattatctgtttcaccattaaatattatgtttactacaggctattgtaaatattttatattttgtggaagaaattacctttcatttctacttttctaagaattttctttctcctgtgagagaattttacattgtatgaaatgttttataggtggctattggtattatgaagtgaattctatttaatttcttaatgtgataagttatattaattaaatattaaaaatttttgtattcttgagatacatctaccttggttatgatttattatcattgttatgcatttccacatttggtttgctaataatattttggttggaatttttgcatataagttaattactgaaattggtctgtaattcttataaagacccatcaatctagtgcatcagggcttcataaagtgaatatgagactgtctctatatttctctactttagagtaatagttcggtaaaaattgggaaatttgttttctcaacgtttggtaaaactttcctctaaagtcacagagccttgttatttaggaagatttgtaactactgattcaaattctttcattattatgaaactatttggaatttgtatttctttttgagtcaatttaggagtgttgtattttttcttgacatttacatattggagccaaattttcaaaattagtcatatgaatccgttcataatatcctcttttaacacttcaatgtttgcaggagctttagcaatatatctttttcattatcataccgcttatttttcctctttttcttgatcaactctgtcagaagtttgacaattctctaattcctgtagagcaaactttggcctttgtagatgtcatatattttatgaatttcttctatttttattatttattttatttggggggaggtcatatatttcttttaataatttcttaaattatttagctcattattttacaacctgtagtcttttctacttattagagctataaatttttctttaagtactatttgagttacatgctgttttctataaagaattctcaagagtttagtttttaaaatgtcttatttccattatctccttttttgagccattagtgtattaaatgtgtattttkaaatttccaaacgtatgagtgttttagtcacaatttttgttattgactcaatttaaatataagacattcataaaatttgatctgtatcatactagttcctggaagtttatgagacccgctttattgacaagtgttcttgctatttgtaaaatgttctttgtgtgcttaaatagwatcggcatccacatattattgagtgtaatattttatatgtccattagcacaagcttattaattattttgttaaaatagtccatatttggctgcaggatttttgcaagattctataatggctatttaaaaatgtggtgttgaagtttccacatatcatgatagatttttttatctttatggaactgttaatttttgctttagatatttaaaaactctgttattaggtacagtaaaattaagactattatatgcttataaatcctttattaatayttaataattatcttaagtaaatatttttatcctcaattatatttatgatattaatatagcaaaaacagctttttttcttttctagtattttcctggcttatcatttaccattcctttactttcagactttctctttattacatactaggtctatctcctataaacagcattcctggatttgttttctaatatgactgtgtattttaattggggagttcaattcacttatatgtgttatgatttataatatactgaaacatatctctatcatcttattttgttttttctttttgttccattattggtttgtccccttactttcacccgccccttgctttatttttaattaaattagtttattttttctctatgtgacctcttttttcagaaaatgcacactttttttctattattttagtaactacctttaaaaatttaacctacttataacacatcctaaacttcactatcttttttttcccaccaacaatacaagaactttatgttttctttctattttaaagcaatagtcatgtcctaacttacatgcttaggactttagttgtatttataaaagactagtagcactgacgaggtatgattgtactgttttaaccatcagtgtttctctatacttgctcgctatttaccatttttcttatcaccatttatgattgtatctgaaacctctgttctgggattgttttctttcttccaggacattttttmggattttccttactgacggtttctcagtttttatttatctatgatgtcttttaccctcattcttgaaagacagctttgctaagtacacagttcaaagttgatagtttctctcagcactttaaatatcttctgtgcttttctggcttccaattttgatgaggaaaaatcagctgatagtctgatgatcatttcttgtagattttctattttttttctcttggatttcttttaatgtcttctttttggatttgttatactgtgtcttgcttgccatgtatttttagtggattttactcagtcaagttgtttaaaatatatacgtattaggaaaatcaaaatttaatgcagccagtcagtgatattttgtgatatatcccttgcaatagactgcaagcaaccttgctgatttcaataatcaatgattaatttatttaaaaaaaacatgtttcaagtacctatcatatgccagaaactactttaaatactgaaaatactgtggtgatccagacagggaaattaggtttcctgctgaagagcaatgataaagagataaacaaatggacatatgatacaagttcatgtgaaaatgtgttatggatawaagtaaaggatgaaagagagctagaggaaggctgagcaagaaggctagctctgttagcttatcagaaagctttactgataaggagagatttgtgctgagtgaattaagggaagmattatgtagatakgtggggaaagaatattccacacaggaaaaaagcaaatacagaagctctctcagggtggggcaaataagcaggtcttgacatgtttaagaaacttcaaggcctgagcgtctgaaagtgagatgaggttagagagatagtcaagtgctacatgatgggatgcatgtacacgtccaccctcacacatacacacaaacacgctgtggttcatacacacgtatgcatacgtaaataatattaaaaatgaagggtctatttctaatagggcataaggatagcaacggtggtaagtgctgattgtgaataaggaaagctgcattgcatttcatatacattttgccacacatttggcctttcttaaaatgttatattgctgtctaccctaaaatggttcaacaagtaaggtatgcattgaaatacctgtgttgactccaattatgaccaaatcctaaactgtggacaatggatatttaccatgcatactatatactgcttcagtgaattccttaaaacagccaaagaagactgcaattatcttacctaatccagttcacattacaaaagactagagaacatagatgtgattgatggaagattcttttcttttcttttttattgagacatggtctcactctgtcacccaggctggtgtgcaggggcgtaatctctgctcactgcaacctctgcttcccaggcttaagtgattctccagcctcagccccctgagtagctgggactacaggtgcctgccatcacgcctggctaattttttgtattytttgaagagatggtgttttgccacgttgcccaggctggtcttgaactcctgagctcaaaaagatctgcctgcctcggcctcccgaagtgctgggattacaggcatgagcccctgcgcctggcccagtggaagattcttaaaaggaatttaagtattctgactatcctgctcagtycccttcctaagctttggtcccacttaaactaaatgtgcaagagaaggggaaggacagtaaggaaatcactcatgtccacaaacaggaggagtagcttttcagtctttaacttgttgcatgttgagctataggaatttgtaggttcactttagactgttaccagagtggggtaggacgttcactagaaggcctgataaatgtgtcaggagtttgagagcttatgtaaagatcgaggaatactcaggcttgtcacctggagaagagataagtggagagctggctgaacgtgcccatgtggataggtccaagagagagaagtcagcagctgcacagatgcaaaaactgttggtggggcaaggatttttccccctgcgggccagtggacactgcgcagaagccaattttaatcatgaaaggatttcaccaacaatggttgcctgcaagggaaaagccaccagtagaatgagactggaggcatgtgaaagagctgatgaaggcctgcaaggtcagccagtgagtgcatgacgcatctcagtgaacttagcagatacaggtcactgacagtggacctgagagtgttcccattcataaggaacagtgtttggatgtctgctgtgactgaaggcctttgaagaacccagagagatcaccaacttgcattgctaatccagtctttatgatttttccttcttcccagtctccagagctgtaggatctgtaaagtaagcaggaaggaagtggagtaagaaggaaaaaatataaactataaattatatagcctcctctccccaacacacagagatgtacacatcacatttgcccactgctggtccctgatcctgtgggtcagctgaggagttggggaagcttcaaacaaaatgtgacattaaggttttcaatgaggctgaactggactttttaacatctaaaaatgagactatttctatagtaaaagtaactgaaaagctgtggaatacatcagattaaaaactaaagaaagactagggcttggagaagaataatcccacttccatttcaccccattcaatatatcagtgcattattaactttctattgctgctataacaaattaccccaaatttrgtggcttaaaacaatgcaaatttattcttttcagtcctggaagtcttttgacaggactcaatgggccaaatcaagatgtcagcaggactacattccttccttattcaggggatggcagaattcctttccttgtggtcgtgagacttgggtctccattttcttgctagctgtcagctgcaggctgcccttagctcctagagtactctccccattctttgtacctctacatctcagagccaacaatatggcgtggaatcctcatgttgtcatttttctaaccctttctgtcattatgtctctctgtgaccacggttggaaaaggctctatgcttttaaggatgcatgtaattatgatattagctgtgctcttagatggtcttcattatatgaaaatacatttattatatacctaatttgttgggaattttattcaggaaaggatgctgaattttgtcaaatgctttttctgcatctattgagaggatcatatgatttttatccttcatcctgttactgtgttatatcacgtttattgaattgcatatattgaaacaaccttgcaacttagggataaatcccactttatcataatgtgctttcaatttggtttgctagtattttgatttttacatccatgttcatcagggatattggcctgtagttttcttgttttgcagtgtcccggcctggtttgggtatcagagtaatgcttccctcataaaattagttagaaatgctcccttcttttttaatttttgaaagggtttgagaagtatttgcattamttctttaaatgtttggtagaatttaccaatgaagctttttggtcctgggttttactttgttgggatttttaaatttttgattcaatctccttgctgttgcctgcttcagattttctgtttcttcatgaagactctgtttctcagcaggatatatgtggctaggaatttatctgtgtctgtaggttatccaatttgttggcatatagttattcatagtcttttatgatcctttttatttctgtggtatcagttgttaagtcttgttcaattctgattttatttgagtctgatatctttttttattagttaatctagtcaaaggattgtcatttcattcatcttgtctgaaaccaactgttttgttgaccttttctaatttttaatgtttttatttcatttatttctgctgtaatctttattatttccttctttgtgctaactttgggcttagtttactcttcttttttttagttatttgtaaaggtttgttgtttatttgagatctttcttttttggtactgtaggcatttattgctataaacttctttcctagaactgcttttgctgcatcccttgttttggcatattgtgtgttyattttcatttagattaattttttatttatgtttgttttcttatttgacccattggtttcccagaaatatgttgcttaattgtcacatatttgtgaatttccaattttcctctggttattgattcctagtttcatactcttgtggtcagaaaagatacttggtgtgatttcagtcttcataaatctgttaagacttgttttgtgacctaatgtgtaatctgtcctggagaatgttctgtgtgcacttgaggagaatgtgtattctgctgctgctagatggaatgttctccatctgtcttttatgtccatttgatctgtagtgtttttcaagtccactgttttcttattgattctttttttgtggatgatctatattctgtaagatcagtaacaggataatcttgctacttcttgagatcatgtttggagattctatcagggaagtgcagctacttgtgtacccttgatcacagaatggtactcctctattgaggaacgtcatcctcttcaactaagtgctcagcttcaggagaaaagcacgtgaagcagtgaaggaggaaggggatctctgcatagccagtgatctgccaaatcaaccctggtgatgaatgagttgacagatgttgcagtcagattgctttcacataccaatctttctattgctatccaatattgtactgcaagcctagttagagaaattagayaagaaaaagaagtgaaaggcatccaaattagaaagaaagtagtaaaattrtctctgtttgaatacgacatagttctatgtatagaaaaccctaaagactcaccaaaatactgttagaactaataaatttgggaaagttataggatacaaatcacatacaaaaatcagtggtgtttcaacatactaacaatgaactgtccaaaaaaaaatcccacttacaatagctacagaaaatacttagaaaaaaattaaaccaaggagataaaaaatttgcatactgaaaactataaaacattgatgggagaaattttgaaagacttgaataaatggaacgatatcccatgttcatggactggaagaattaacattggtaaaatatacaagataatctatggattcaattcaatcctatcaaaatttcaatgacatttttcacagaaagagaaaaaaaatcctaaaattcatatggaaccaaaaaagaccctgaatagccaaagtaatgttaaacaaaaacgaaacacaacaaaaacccaaaaaacaaaacaaacaacaacaacaacaacaaaaacgaagatggagacatcacacttcttgatttcaaattctgtggcagagctataataatcagaacagtatgatcctggcataaaaatgaacatatagaccaatggaatagaatggagagcccagcartaaaatccacctaaatgtggttagctaatcttcaataagggtatcaagaatacaaaatggggaaaggataatctcttcaacaaatgaattgggaaaactggatatccacatggaataatataaaattggatcctcacttaatactatagaccaaatttaactcaaaatctattaaaatcctaaacataagacatgaaactataaaactacttgaggaaaacttagggaaaccctccttaacagggtcttggcaatgattttttggttatacacaaaaagcacaggcaacaaaagcaaaagttgacaaagggattatattaaactaaaaagcctctgcatagcaaagaaaacaatcgacaaaattaaaaggcaacctgtgtaatgggagaaaatagttacaaaccatatataygataagaggttaatgtccacattatataagaaattcatacaactcaatggcaaaaacaaaaacaaaataacctgatgaaaaggcatgcaaagaacttgaataaacatttcttaaagaagttatacagacatatatctggccagataaaagaaggcatatatctggccaacagatacatgaaaagatactcaacatcrctaattatcagggaaatgtaaatgaaaatgaaaatgatgtacctcacacctgttgggatggctgtaatttaaaacaaaacacaagtgttagcaaaattgtggagaaaagggaacaatgttacactgttaatgggaatctaaatgggaaatttatcattatggaaaacagtatggaatttccacaaaatattaaaaatagaactgccatatgatccagaatccaacttctgaatattcatacagaggaattgaaatcaggatcttcaagtgtcatctgccctctcatgctctttgaagcattactcacaataggcaagatacggaaaaaacctaaatgtgcattagcagatgaactacaaataaaatatagcatatacatacaatggaatcttattcagcctttaaaaagaaggaaattttgccattttcaacaacgtggatgttcctggaagacaatatgttaagtgaaataatccagacacttacatgtgggttctaaaatagttgagctcatagaaacagggggttgccagaaactgcagggagaaggaaatggagaggttatggaattaaaaacaacaacaataacaaaaaacaaagaaagaaaggaaaacacaagattttattgagctcctgtgcataattcrgagtattcttcccatctcaaagtctttaatctcaatcacatctgcaaagtcttttttgctatttaaggtaacattcacagattctgggagttagtatgtgggcacctttggggaaatattctgcttaccacaaccagtttcccaagattcaaggtagagttcttctttaatattctcactgtatatggctataagcagtttaacaatccattgatatttttcagaaatcgatgatatcatttatttttaaattacagtgtaatgtacactgaatagaacacacagattttcataaaacacacataatgtcttttgacaaatgtctatacctgactatcaccacaaattataaaatatttaaatcaccccagaaagttccttcatgtccctggtagtagacctagatcataggcaracactgatctgttttttcatcataatctatttgttcctattatagaactttatataaatggcagtatagagtatgtggtcttttctatgtggcttctttcacttaaaatgtttacgtgatacatccatgctcttgcatgggagtttgttaacttttactgctgagtagtattttatgaatatgaactaatttgttgattcattctagttttgggctatgatgaaaaaaactgctataaagaaacttttccaaatttgtttttggacatatatttttatttcatgtgggtaaatgcctagcagagaaaacaatgttacagcttaactgtatgtgtattttataagaaaatgacaaactattttccaaagtaattaccactttatttgtggaatctgtaatgtcagctttcttattcctgagagtggtaatttgtgcctacattttatttgccttatcagtctggctagaggtttatcaattttattgatcttctaccagcctttagttttgttaatattcrttactttttttctgtttccyattttactgacttcatcattattatttctcttttttctccagacaatatgttttatttgctcttatttttctagttttcaaagtggaagctgaggtcatagatttcagatttttcttcttttccaatacagcatttattgctataaatttccttctaaatccagctttatctacattctgtaaattttgctatgttatattttcattttcacttgtctgattttctctttgagttcttttttgacacgtgagttattttaaagtatattatttagtgtctgattacttgggcattttttcagctatctctctttaattgatacataatttaattccactggggtcagaaaacattttctgyagagctttaattcttttacatttattgatatttataatggtataattttttatctcttcctacagtttgtattactttattgtatatttacttttatgcatatgtagattctcacatttaattattaattttcttaaaaagttgaaaaattttaaacaagtttaaatgttggtatatgtttatatgtgtttgtgttgtatgtttgtgggtgtgtgtgtgagagagagaggaggggagagtaaaggaaagaaagggagagggagagggagagagagaaagagagagagacaaaatatgtacatattcatcccttgatatattcacaggggattggttttagaaccccccttaaatagctcaaatcccttacataaaatgttgtaatatacacatgtagcttatgcaatcctccgtatactttgtcatctctagattatttatcatacttaatataatgtaaatgtcaggtaaatcgttgttatgctgtgttttctatttgtacttttaaatgttatattgttgcttttttattttttctaaatctattttatctgcagttgatataatccacagatacagaacccatggatacaagggtcaacagtatacgtataaaataaagacaatttatggaatgtcttttatatttgctcacatatttaacctttctagtgttctgtattcatttgagtcgatccaggtttccatttggtatcatttcctttcaatctgaagtatttctttcaacatcgcttgcaccactgttctgctagcaacaaattctcttatcttttgtttataagaaaatatttttattttcctttaatctttggttaatattatcatttgatatataaaactatgttgacagttatttcacactctaaagatatattttcaatgtcatttttttatttttgtctttcctttttttgaaaattagaaatcggctgtcatgcttgttgaaaagatgtatattttttctctggttctttttaagagtctttatgtagtttaatgattaggtagawttcctctttttttttccggttgaagtacattgagcttaatgtgtggcttgctgtttttaataacaattggaggacttttagctaatatttcttcaaacacaattttctgccccattttttatgtcctctgtttctgagggtcctattacatgtttatttcatcacttcggtatggcccactggacattgaggactctgttcattttcttgagtctcattttcttctttgcacttttgtttttcttgccctgtctttaaattctttgtccttgacctctgttgtgttcaacctgctgctaatatcatccaaaaaacttttcatttcacacattgtactatttacttctaggattcccatttagttcttttttacactttccagttctcttttgaaattgtcacttcaccattatattcatcttttcctgtagattgtttgacatgcttataattatttttcagatttttgtcttatacttctgagtcatttgtgagtctgtttctattatcttatttttcacttgattatgagtctcttttttctgcttctttgcctgtcttgtaatatttgatcatcttctaggcattgtgttaaagaaaaagaaacagtggaggcttaaaagagcttgtttctttggagtttaattcttttaaaagtttctttgtttgtgaagttattcaattatttaaaggaaaacatgcttctctggggcttctttggttatctattgttactttggcagactgaaggttttgcacatccttcttcttcctagtcaggtgtggatctccaaaacagattcatatttgagaggggtgttgaagctctttgttgtttccaattttatgggtcatactcataaaggacaaagtcaagtgatgacaacaggggcacatttatttatttatctatttatttcttcaacttaaatggaggataggacaaatatgttactaaatactttctgcacatccactgctgaaaagctacctaaatatctgagaaagggataaatcttggcagttatacatttactttgtgggaaactaccttgttttcaaccttcttgcctcctgttgtaccagtgctccaactctttctgaaagcttaagttagccaaattatggactgacttacaactctgaaaagtttcaaacaaataaacacttaaaaactttgggtgaagtaaaaggcgagagtctasctattactaagattttttgttcaggtaccaagacctgtcagctagttgtctggtctatggtgttcccacaccacagtccatttccttctaggatgttagtccctccgtctgcatttctgaagactaaaatgtcagtttctcatttgtagttttaactgcctgctttatggtaattggatctgcctatttccagcctcttcatctggctcttggcttcagactgtcgggatttcattacttatatatgctttagcttatactgactaaaaattgctgcatctttcttcagactctacatcactccccgctctaaaccttgctgagcttttctcagtacctgacacctactttgcacttttaaacaaagtcctgatattttaaaaataacataaatgggaaataatggttcctgaaataaattatagtctttagcatttacttacaaggttttctactgctatatttttacctgaatatttaaaatatagaacaaataaataacataaaatgaaaratatcttccaagtaatttatgtttgtttttatctttgatagtattaaatttgatatctgctggtttatgtatattgcrgatgttccttgcttttttgtttcaatctctgcaaaagacattgtttggcttttttgataccagtgttcarattgtacatatcatacacacttggagaacattagtatttttcacctctgtaattttatatggcagyaaatttcattcacatgtgcatgctcaccccccaccccaacttgctataaaatgaaaaggctggtcaattgctttgatgttctttatatataatgctattatgtacctaatgccacataatttaatttctgtggtcaaaatttgtattcaattgcctagtttttactaaattgatcacatttacttgttggtagctattctactagtgtatagccytggaaaattagagtttaatgcaggaagaacatttacaattagaataatataatcaaaactaaaatcatctatccaaagaacctagacattttgataatagttatacaatgtacattgcaattagttactctttaaatttttgaaattttataaatctgattgaaaatgtttataggtaacgaatgatggtgaaaatattwgtattactgttgattgaaggcacatctattgtagtaaaatatgagtataagagaaagagatattacaatggggcattcgttggtacagtctttatagcccagtataatctttgttcaagtcatgattattactcttattgtgtgttatgatcttcaaaaaggctatgaacttctgtcttaaaaaaatagtgtcttaaaaacaaaaacaaatcttcttcttccctaatttattttttttttgaagttttgcatacttgggccatatttatatgacaaaaaatatctgatttttttttgatcaatgtgatccaaaaatcagtcatgtttcaaaaaatttggycaattgaattgttgggccttatgtcaaataaaaccactgcttgaaaactaaacaaattgctttcaatgggttattattgccttaccaagaccacatcctgatgatttccccygtcacaacaagactttcttcatagtggatccattgttattattttcataaaaggctcaacttaaattacatgcaatagaagcaccatcatcaggtgccctgtctccttcctaacagaagcctggtttttcacgaatgcatttagtcctgtctgtagccccagttttgacaggctgaaggctgtaggcatgatgggccgcagatgccaggcttcttaagaactgttttccagtgctgtcaacaaactccctccttccagattctttacagagcagggctggcagctgtgcataggctttgggatccaccatccagttacatttctaatgctgggctcttgttttcctggctcccttgagctggctcaaagaaacaaaatggtattcccatatgtcccttattgttttcttggcaaatatccctacttccctgaatctcccagattccagcatgtgagagacaaattttctttgtgaaaattccctccctcaaaggctgcagattaatagcattgattctaaagcaaactgtctttttataaggtcttttgtaaggctgaagttagctgggtttaggggctatgttagcatattcggaaatattatgcatatggtaaaccatagcaatacaatacaaaggyaatacaaataactgagcttgatttactaatttgaatgtcaataccaatagttcagatatgaagagatgcctattgactgartgatcctctttccctttctcataaagatttatgtgttaaggcaaaacaactatctacaatctttagtagacatatgcatttatttttacttctaartaaagcttaattccaataaattgaagttaggaaggaagcattcaactttcatattattgttgccataatataaatcaygtggaactatttttcatcacagagattagtgtagctaaagaggaagactttagaacacatcaaggatccatagttactattgaacagcaactttgaatgtgagctagtataggcatattgaataaatgatgaactgtatcatattcatactggttaatttgagattgccagttatttaacaggatattaactgtagctatatctgagccatttctgaaaagaggaatcggagccaattgttgcacaagctcttacaaggtcaacaaaaccaagggaggtgatgcaggaggaaagacttcgttttctctctctgctcctaaattggtttctggtcatctaaatcccccaatccawtaccagagagtgagagcaggggaaggcagtattcattcattccaattttcatgcatgatctaactcaacaatttttaacgtaccagtgacttcaacaaagacactgtgtttaatttccacggaacaatgttcagtttctttagataaaacaaaatggaatcccatatcactatgttaagtgtaatcaacaccattttggatggggaagcagtcacatataaatgacctatcagaggtattccacaaggacctaaagaattttgattgtaattttttgggccctattcaactttacccgaataaaagggggaaaattcttataaataaacgacttaatatacctaggtgagaagttttttgtttttttttttttgaaatggagtctcgcgctgtcgcccaggctggagtacagtggtgcgatctgggctcactgcaagctccgcctccsgggttcacgccattcttctgcctcagcctcctgagtagctgagactacaggcgcccgccaccacgcctgcctgattttttgtattttttagtagagacgggtttcaccgtgttagccaggatggtctctgtctcctgacctcgtgatccgcccacctcggcctcccaaagtgttgggtttacaggcgtgagccaccgcgcccggccgagaagtattatttatattgtaaggcctgttacaacaaatatcacacactcattcccccaaaacaaaaacaatmaaaaaaacccaaagagggttcaaccaataacacaaatgcttgaagcagtgattttccagaacaaaattttagtgtaatagaacatttggatcttttttccagttaaatctttcaaaagcattatgtcctgaccatgtttctgatttcttgacctctgtacaacttaatataaaaaatcagaagtttattgctgtaaatattttaaaatatgttaaactagctaatgtatactttattttcattatgcttttgttctgtcatcaggtaagagacgtgtacacatggcaagcaagatgattgggaggttagaawgggcacttgctggcaaacctatttttgacggagaaaaactgtactatcccagcatagtcatagaaactgcaggttctggctgctttcaacccttcttttttaaaagacccaaattgcctatgcacaaatatatttaataattataattatcattaagtagcaaggtagattaaatatcctcagtcattcttcttaaaaaataaaaacaaaaacctcaacctacatttaagcaaaaaatgcttcttaaagtcattttcaaaattgataatgcatcgatatgaatttgggtagctgaaattttggcttccagtgaaatagttcacacacataaaacatcgcatgcgaattttgaattcagcaaatgtattggaagtagtaattcaaccatcacatcttcacttggaaatacatgctgtagaatttttccatactgtgcttgcttttgataaatattattttactgagcattgatactttcggacatttagaagtaccttagtgctgatacttaagcactgggaggtaattattgaactctaaattaccagtacactcaaagagaaattttaaaaacagaatcccgatcagctggtctgatatgctcaattagtttttggatagtaggcagttatattatacatraaacatttttctctgtatgattttttattttgttatagtttcctaaaatagttatatttataaaacttaagtaaaaatctaatatttgatcaastactttcaacaaagaaacacaatcatctcatctcttgtcagtttataaatgtcacatagacttactattctctgcactgcagctatacctttaccaagaataagtatataaaaattagtaagtagctagcaggactactgggtattaaaggtagtattaatttaagttctggctcattgcttagtgtttgttaaagtctgaatcatcttgacgttttgttctgcattctgtatttattggctgattctggtacacgatgtgttcttactctcatcagtggagatttgacccttatttttcatgattttgaagcctaaattactccatctaggttggaattagtagcagttcttaccatccaaatactatttggctatggggatgttagagaaatggaaatatacgtttctgttgcccatgggacaatcttaatgaatgcagcaagtaaaatgatcatattaatttgcactttcttattttctgtacctatcmttgccatagcaatagacttagtttatatgaaattaaaaaaaaaaatgtctagccaggtacagtggctcatgcctgyaatgccagcactttaggagactgaggtgggtggatcacttgaagtcaggagttcaagaccagcctggccaacatggcaaaactctgtctctactaaaaatacaaaaattagacaggctttatggtgcgcacttgcaatcccagctactcaggtggctgaggcaggagaatcacttgaacccaggaggcggaggttgcagtgagctgagatagcaccactgtactccagcctgggtgacagagcgagactccatctaaaaataataataataataaataaattttaaaaaccaacaaaaaataaatgtttaaattggttccagtgatttgcttactgcctgccctttatttgcctaggcagagtttcactatgtatataaggaacacaaaaataaatctgacattttgataaatttgcccagaaaatgtgaatttcatcagttatgaaaatagactagtctaaaatgatcagattctttttttttcaaatccagttttgcatatagactatgccatagattttctttcctggataccacatggctatatttggcaatcaaatattctcttgtacttccgcatatggtcccaccggaaaacatcatttcttccctttaaactaaggagaaacatccataacaccaatctaaacaacagcaagaaagtaggaatgtgagtattcagtccttgaaagattaattgtcacktttggtgacattaaaatactgccaaagttctattattagtcatgttcatgcctgaagagaaagtaaaacttgagaagaaatgttacaaatcagtttattaaaataaaatctatgtcaccattaagttgactgaaatccacagaaaggtactataggatatatttgcttagattaactgcttggtctttgtaacttaaaataaaatataaagcaaagagtttttccatgttattatgtagaaaaaaatctaaattgtattgcataatatggcatttgtgggttttactacaacaatctaagatgctcataagtttaaaaaggttaaatatgaatatattcscttcaaagttcgagaaacagatttgttttcataaaatgaaaaaattttctatttttattaccattaaatgagaaaataagaaattaagtcactgaattctttcttgcatatgtcttctgatagttatattttgtgagactagtagattttcaagtcctttgaaaaacagtaaattaattatttaaaaaacttgttgagaaattctcattgaagagagacatgttcttgagccaaggagaaacttggttctagtataatatasaacacatctttatgtcagaaaaatactatacaaattccctgttaggagactcagaattcggtgagaaaagcagatactgtaagaatagtaatcttattttaaaacattttcacagtttcatcaaatcaatgattttattcattataaagcacaaaatattttatgtgttttaagaaagaaggtgttgtgctcccaagtctaaacagcaaccttctcccaaaacctggggtgcaaaatcgggggcccttgagagaaggaaaattttctagcaaagcccagagtagaggaatggccagagggagaggaaaaaagctagggtagtagctactcataaatctattttatcatcctttactggccactatatgtcagatactatgtaaatctagcagmtaaaatggtgagcaaaaagtagatgttttggggagtggggaggaggacattaatcgtgtaataaacataataacaacaaatgtattaaataatcacaccaagaggtgtatcattagaaatagagatgagttctcagaaatcggggttggcaaatctctaagggcatattatagagtgtcttagtccatttgtactgctgtaacaaaataccacagatgcagtaatgtatgayaagcagaaatgtatttactcacagttctggaggctgggatcaagtccaagatcaaggtgccagcagatttgattgtcttgtgaggtctttctctgcctccaaaatggcactttgttgctgcagccacctgaggggagggacactgtgtccttacagggtagaaggcgaaagggcaagcccrccaaaggctgcaagaagcctattttataatggccttatccgatttatgataggaaatgctctcatgacctcatcgctgcttaaaggccctaccatttaataatatcatattgacccttaagtttcaacacctgaattttggagggaacacatttaaaccagaacacagaggaacttgatggtgactgatagaggcttaggaatggtttctctggtgaaatgatgttggagctgaaatgtgtggataaggaggcattattcaggcaaagggagggagtgggtaagtggaagacatcccacatagaactaggagcataggcagagccttgtggctgcaggaaccaaaaggccagtgtggctgsggtggagaaagcaagatgratggtgrtacaaaataaaactgatgcagcgggaaaaggaagatcaactgtttttctgtatattcacaattaacatagarcacttcagacaccatatgtatgtgttttttcctacagccagcaattctccaattatctgcagacactgactggatgtcctacagtttaactcaattctgacactctctacctgcagatagaatcagatctcacaagttaagggctcaatcccacaagactgtccccacttcagatgctggttgcatgtccaggttttcatctgtgcctctgcccagttggctataaatcagatgttattacaaccccctctttgtgtttgattatgctaggataacttccagaactcaggaaatcagtttacctactagattactgttttactatgagagacacaactcaggaacagccagatggaagagaygcatgggaagaggtatggaggaggggcacaaagcttccattgcctctccaagtgtgccacccttgcagtttctccacatgttcaccagcctggaaactctctgaaccttatctttttattctttgtggaggttccatcacatgggcaagattgatcaaattattggcccttgataatcaactctacctccagcctctctctcctccccagasgttrggctgtggggataaatatttcaatcttctaatcatattgttggttcctctggaaaggagccaccatcctgaggctatccaggagcccccagcccccagtcatctcattaacatacaaaaagacacctttcacttcagagagtccaagggtttggtttttgtttgtttgtttgtttgttgttgttgttgttgttgttgtttgagatggagtctcactcttgtcgcccaggctggggtgcaatggggcgatcacagctcactgcagctgccgcctcccgggttcaagcgattctcctgcctcagactcccgactagttgggattacaggttcccgccagcacacctggctcatttttgtgtttttagtagagatgaggtttcaccacattggccaggctgtcttgaactcttgacctcaggtatccacctgccttggcctcccaaaatgctgggattacaggcgtgagccagcacacctggccacatatttcttttttatgtcataggtgaacagagaccagatcaggcagttgactagtcttaaatgacttttcttctgtgccagattgcctggaataggatcccagcactgtcacttgctagatatgaactttaggcaagttctttcatctttctgtgcctcaatttcttcatttgtgaaatggggataataatattatctgcctaacacaagttgttaggattaaatgggcaataaaatattagattttattatgtatcatagtatttgtattttgttatttttgtattatatattctgctataacattatgatataatacttttatttgtcattttgttctgtttttattaagacttaatatgttttttattctgatggaaataacccaataaaagaaaacacaggctatcaaagagggagagaggaaagctgtgagtgagatgtccttgaataggtgagagggactaagattaagtgcacatgccaattaactgttctcacataggatcagggatggtggggtaggtgggtagaatttctggtggaagaatgtagacattgtatttgaattgctgctactatctagtgaaataagaagaaaagtcatcagcaaagggtaaggaatgagcagggtaggagattggaagaacgaaaggaaggtagaaatgctcatctgaaaggatgggagagttcattgttaaggactatagtatgattgctgggcaccacgtagagtttatttaaggttttgtggttgtgaatttagacaagtcatgtggcttttagatatgcttaggtgcggggacagagcaggtgtgacttgtgtttaatcaggatggcaattttaccatgggagtatgttggagggagaaagtgacaaagtgattgaaagtatgtctgtgcctccccaaaattcatatgttgaagccctaatctccagtgtgactgtatttcagtacaggcctatgaggagatgataaggatcacatgcggtcttaaggtccccagtgagataggctggtactgttgtaagaagtggaagaggccaggcacagttgctcacacctgtaatctcagcaatttgggaggctaaggcaagtgatcacttgagctcaggagtttgagaccagcctgggcaacagagcaaaaccccatcttcactaaaaataccaaaattagccaggtgtggtggtgtgtgcctgtagccccagctgctctggaggctgaggtgggaggatgactttagcccacgggttgagactgcagtgagctgagatgatgccactgcactgcagcctgggtgacagggcaagaccctgtgaaagaagaagaagaagaagaaggagaaggggaatgggaaggggaagaagaggaagaggaagaggaagaggaagargaagaagaagaagaagaagaagaagaagaagaagaagaagaagaagaagaagaasaagaacaagaaggagaagaagaagaggtggagacaccagagcccgctttgtgagtgctcagatgaaaggcacttgagggtggcagagggaagacggctgtctgcaagccgcaaagagagctctcaccagggaacaaaccctgctggagctgatctgggacttccagtatccagaactgtgagagakgcatgtctgtgtgcaagccacctaacctatggcaacctgagcagaatacacaaaggaagtatgctggtgggagaaagagacaagatgactaagtgtatatgcaaggaagtaaatttaatgatgggtctgaagtttaacccagataagaaggaaggcaaacatggtggtgggggtgattgatggataagcaaacataaatgagatgaatggattggaagtcccagtgcagatgaagctataactggaatgataggataggagagtaggatgcttgacattgaaatcatgaaagtgatgttgctattggtaattatagggtctaggaatatgactgtaaaaaaagactaatgtattgaaagcaaagagtcagagaactgagaaatcaggatattgaatggattgtgtgcatgttggaatcatatagtgagagctctctttgtggcttgcagacagccatcttctctctgccaccctcatgtgcctttcgtctgagcactcacaaagtgagctctggtttcttatccactgtgtggatgtaagaataattactggaggagtaattcaaaaggcaggaattcaaaaggcagcatattcaatgaatgcattcagatataactgcatacatttgagtgatatataaaaacaaaatcaacaggaatttgtcatgaaataaaaggggatggagaaaagatagggagaaggtgccattaaagagaactcattggtctctgacttgagccactggatcaatcatggtaccatttctaagttagagaaggctggcagaaggccagaagtttgattttggtatagagtttcaagtgactttgatatatccaagtgatattgagtacatgggctaatatatattgggctggttcccagagaagagtccatcttggaaatagaaatctgtgaagtgtatgagatgggtgatggctgaattcataagactggtggccttgcctaggaggtatggaaagagcagaggaaaagacaaagacttggacttgagtaatttcagtatttaaaaatgagaagacttagtatgagcctccaagggagattgattaggaaggggaaaagtagaggaaaaccaggagagcatgaaattatagaagccaagaaaagtcttgtgaaaaggaagatgcagccaatagtgttgaaagtttagggccagaaggctgagaggaaaaaaaaatgaccttggagttagtagcatggcggccattggtgacttttgtaagagcttctttagtggactaatgaggttggaggagaaattagaggttgataactgaagcagacatgaggaaaaggagaaagtaggacagaccaccttttcaaraatgttgactattaaaaggagaagaagaaaarcgtgggagctggagggattgatgggattaaggacaaagattttatatatatataaattataaaaaatatatatttgtatgtaattataaaaatatataattatcaaaattatatagatatataaaaccttcacatacacatatatacacatataaacaaatacacacatatatacatatatgcacataaatatacacacatatcgtatattatgtaatttatatttatataatatatataatgttatatttatataatatacatttttaatatcagaagcttgagcctatttgaatctcaatacaatgtctataatttggaggggaattatacaaatgtaacatgttagtgcgaaaagttttataagggatggtagaaaagcaggaaggttggggtccaaactgcaggcagtgacacagattttagaaggactaacaccttctctagtgtgacagagaataaaggaacccagattgcattaggactcagagtcaggcatcttactgtgttctatcttctctttttctgagtgatacaattcatttttacaagaaagtattgtgggggtaggtgcagtggactttgtgctctcaaagcagcagtgaagaaacaaggacaccaactctgccttctgctgcaggcaggtttgtgaggtatgagagaggaaacagctaccacttgagcagattgtgggagaagcagcgttttgaggtttcagctaaggaaaggggggcactcagaaaatatatggaaaatgtagaggagtttgatattcctgagagcacaatgcgaggtttgggtggatcatgatgactgagaaaaagtttgttgattttggcgagaagaagatcattttcaacctaagattaagcagtttcagaaatagtttagcagaatgatggaggttcccrcaaaggattatgaagtgaaaagcagatacttcgttcaaggaatttggctgtaagtgaaaggaggaagagagaattcaagtctttttttttttttttggttttgttttttttttaataatccaactaattacctatgagatttcatttccattttgtttcttaacatgaactctagagtcaggttgactttcttccataatgctttctaaaatcctttcttctttgttktcatgctttaactcctgcctaggatgccytaaatttttttttcttcctttgtaaacacaacttttctggtaagacccattaacatctacctctcaatattatctgttatatatattttttccccattagataattcatttttgttataaaactattggaaaaatatgtgaaatttagccgggtgcagtgctgcacagctgtaatcccagcactttgggactccaaggtgggttgaatgcttgagcccaggagttcaagacaagcctgggcaacatagcgagacctcgtctcaaaaaaaaactatatatatatgaaattataaattaaaaataaaataacccacattaaaccttccttcgtatatattatactatgtatattattaatactaacacttcaaaaatttacatgataaagtctttttgnttccactaaatatttataacaaaatgttaaagactatctaatagtccatggtatttggttttccctattataaataagacactatcttttacataattgcttgtgtacatagttaatggcacccttaaggcagaaattttttaactagatgactaaatcagaagataagtatttttttaaggctctggatatatagagatgaattattttctagaaagtatctaatgaattatccttctacaagcagcatatgagcatttagcgtacccccctccattgtcagcatagaacattttctaaaaatttaatttccagggtagaaaaatggcttctctctgggttctaagctatgttcatttaattactaattaagttgaattttttaatagctactggttactgggtgttttcttctttgtgttgttatgccatacctttaacccattaaacatatttttaattgaatcacaaaagttttagcgtggttgatctaatcataaaagttctttacatgctaattatattcttgtattatatattgttattttcatcctattggtttcccagtgaaccatgtgcatctgtcataagctttaccaaattctctattctcagaagtcctgcagcactctatagtgtcaatctaccatcttaatgtttcagtctctattatcttgtgttgttcattgatagttcctttcatattaatatattaccatcagagcgatagtaagtgtcttaagaataagaacagggaatatgtttatcaccattactagatttctaattgacattatgttatatgattctaatttgtttattagtgtattattatatatattcaacaaaatatatagcaaattaactcattgtgtgttaatgaccataacattctggaaagatatgtgtatgtttaaagacctagagaatagattagttttctcaatatttttatatatgcagtaaaagttttgaaaaaaagtctttggggtaggttgaaattatttcaaaagttttaggattgtgtataaaacagcattaacatgctcttttgagcatgttacttgaaccatagttgagtgaaaggtggtgtgaaccatgtgataaaygattacttcacgtcaaacaacccaacttttctgagcatgctggctttgcaaggatttatagttccctgccttcatgcyggagttacttcagctttccgtgatgcattccaactaatctggaggttaaggcatttcttgatcatggatagatctgcttgcttctcagccctggaattctttataaaattccagaatgcaggctagaaattgacttagggaatccaataaagttgcaagtcttggcggtcatccaagctaaatttatagactggaagaaatatgggctttccattgttctctttttcacctttctgggatttcttttgtgtctatgtgagtgtgtgagtgtaaatttatcattttactgacattggagtgtaaataaccatcaaggagatccagttaaagaattttcactttggatcttctctggtctttccaaactttgacccaaacctgcaccaagagtgaatttcttctccctctgtaggatgttgatgtcataaaataaggagttgttcttgaaaatgaatcatgctagtttaacagctgacatgcatgtttgccagctagctgcacctccccaaatcctgcccttcccccgactcggagccttcttttgggacatgatctgagaaaatgtgatcayatgtgttgtttctcttcattctatgactggcaatgggggaacaaaaacaatctcggaagcgtatgagacttcagttttgtgtgtgtgtgcctgaggcactgttgtgcctggagatccaagcaatccctctcctaccctctccrttatatctgaccattgaaaacctgtcttgttttcacagaatgggtttgctgttgtgaggccccctggccatcacgctgaagaatccacagccatgtaagtaccagggactgttgcccatctccaagcaccacggttcctggcggtcacctgccccgtgcatgtttctgaagcctctaattgttagcagatggactgaaaaatcttgcgaggtactcccagaagcagatttatggcttcagagatcatatagcatttaaaaaaatgctctgaacattatttataatggttttcctggatgatttgctttcttatttctctgttcttctctattccgcagggggttctgcttttttaattcagttgcaattaccgccaaatacttgagagaccaactaaatataagcaagatattgattgtagatctggtatgtattcctggccagagctgcattttcagtgattctagataaaggggagtggatttgtatttctctgttaggttgtcttgcttttagcacttgcaaacaactgaagggtgtgttttcctttgaatgtggaaactcattaaactcaggattgcagttctgaaaccataaacattcacgtttcactttcatggtgttaactgcaatttaatgagaagaaggcgcagatcagggcaacttttatgatccttaaatgaaytgatacttccacagttaaaataacccaacagaacctgaatttacttttccctacagaatatagactcaatagtcagatgtgctggaaagaatgctgttgctttggtaaccaattggccacttccccctggttagaaatcatgttgcttgttgtgcaacagtggtattattaaaacaagtcggcatgtcactcttactgaaaagatctccaatctcagatgccagtttgggatgattctctgcaggaaccctgagtgactgaaagttagaggcactagattagtcttgtattttaacgtgatgcattcttacacagtaaagttagaatttgtctaacaaatggtttgtttaaaagcagatgacacttggcatattgtccacagtatattcatgaataatgagctggagatctggagatctgccccatacaaaaaggaccaacccaggaaagggcgaaagagaagtgaatggtgatttatgagccccrttttcagtttgcctccagttctcaaggaggtgtaataggttgtctgacaaagcatagacaggaaatgaaccctggcatccaaaccgaacctggtacatctgcacttaattaatttttgcaggtgataaaagatttaaaggcaaaatatgctaaaggtttttttttgaagtgcaagccttaatagtctaaatcttgttcatatctgcactcataattaaatcttattggaagtcacggcctcgccctccagccttcgaatccagttaagcaggcacaccaaagggttgagagagcacaaacaaagccatgtgaagaaatgcttagttaagtgaaaacgaagataaaagaaatggaagaacgatacccatttgttgtgcttcgttgcaatgggtatttttcacacactatattgaagcattcctgcaagcactttggagagaagagtattgaaacctaactatccatgtattttccatacacgcctgagtctcaatgtcaggcatagctcaccrttaaagaaatgtgttgaaggcctagatatactacagcagcaagatgttacaattttacaaaaatcaagacatcagtacccattttctcatttatatgcaaaatgacagctaaagtaattaataattgctgttctgcataatttgtaagatattaaaactttaaaaatagtatgctcctctttctgtaagttctatgccagggagataagccagaaacttaagaaaagcagataaagagcaaagattgtagggaaagaatttttctaagctttctcaatttgtcaaaattatgtaagaaggtgattggtcaacagtttgtcctatccttagggatcttttagtgtttactttctaaagaatcttctctgctaccattttaaggttctaggaggatagtcaaaaactgttaggagtcccctttgaaaacacatttgtgatatctagactcaaaagtagtgaattgtacaagagacttgaaagctaaaatgcctcccttgtgataaatggatactttgtatttcagaggatgtatatgtaaagttttgtttttgtacagtaatacagtataggaataaaagactgctggaaaaatctgatacgatttataaaataagttacttggtagctccaaggagtttcctgtaagcttcctggcctttgattatgtatttgctccattatccaatcagaaaggatactgatttcccaacaggctgtagtagacgagaagtttttgtttcaaattmtctaaatatatggagttctgtccaaagggttgcctctgagatcaccaccagcccacatattcttactttcaagtcttccaaattctgcagctgcagggctactttgaggaaattcctgtttcttccagctgctgagaaggaagttttaaggtgccacgtggccttgagacatccgttctccctggctgacaggtctattctgcaagttagcaatgaaaaagccaatagatggcttttccrtagccaaaaaaaaaacaacaaaaagttattcctgcaaatccaaagtcattaatgttagctggggggtgtgaactaactccacaaattacagcgccaatagatggcaaaggtactcctttgtccagcagtttcagcatttttatatgtttagtaaatgcagagctagagttctaatttgcctactactttgggtcacagccaaattcagcagcgttgagtattttaggcaagaatgattctagttgatctgtggagctcatttattccatgttcctttytgaggcagatcccaaacatattcagactagtgtggacagggagcaggtgtacttgcttttcaacttgcaagagactgaccattgtgtttaggggattaacttgtcctacaagtaagactgtatgactcaggtagcttttaggtaatgtgacttttattttgacaatagtactttttaagctgtctttgtaaaaggaaagttaattcaaatgtccttagattttgggaaattgcgttgttgatcaagtacatttagatctttattacaagtccctatactgagtaactaggagtgataacattagctgctagaatatatgatttattcaaggttactcaaagttattttaacataatagtgaaaatatacaggttctaaatccttgtacagcatcaatgtttgcagtatgctttttaaccagtaaaatatttaaacaatttttcagcatttccccacatatcttagatacaaggtctattttgggagttttaatgtttcattttatttcatttctatagtaatttctcacaatcaccaataattttcttatcttagtttattatatatgtgttgccatgaagaaacaagctttagatcatacctgaccaatcagtactttgtatgaatattttacagcaaggaaaacaaacaaaaaaatgatatatatatatatattttttttcttgagacggagtttcgctcttgttgcccaggctggagtgcaatggcacgatctcggctcaccgcaacctccacctcccgggttcaagcgattctcctgcctcagcctcccgagtagctgggattacaggcatgcgccaccatacccagctaatttttgtatttttagtagagacggggtttctccatgtaggtcaggctggtctcgaattcccaacctcaggtgatctgcccacctcggcctcccaaagtgctgggattacaggcatgagtcaccatgcccagccttaaaaaaaatgatattcttaaggctatactgtgagttgttcccccaaacaaaagacataattgagtttaacctttatcactaaatatttggtgaatatgaatacagaatcaagaattgccccattagaatggatttatgtattttaataataatgtctgttgaaaatcttattatgctgtgaacaggattttatttcttactcagaaatttatgcactagtaagtacccaacagatttttcaagaacaaataattttatatctgagagaacatatcattttatatttgactgttttaagtaaacatttacagtgtccccagagaaacaaaagtaatcaaagcaatatttttctgctgttcaaattgtggatgcatttatgctcaaaccaaatgtgtcttagaactgattaaaattactattgtataggggaaatacaaatatccccttaatgttgtttttcaaaatattttatttgtccattttctagatatccagtaacaaacacaaaagacattgtggctttaattgtttcacccttgtttacatacaggaaaatagtttttttgtctcctccttcctttccttgggatattcagaaatccaggaattgatataatttgactaagttattttttttcctgatgatgtatgtctttagctgaaacaactttctgggatgatgtgtatgtgccccaacattatgatttcttaattttggatatgtgtaccattcaaaaagggraaaggattattgtatgtctacaccgtggatggcaagatcaatgcaggttttcagaattcaccaaaagaaggctatgatagtgtctagtgaaggagtactgggctggagattggcatgaagacaggtcatataagtctcctatggagcaataatgactgacaacccacctcacaggtttgccaagaggatcaaacagattatgaatgtaagtttcagttaactgtgtaattgttaagagtttggcctttggaataggaagtagattcaagacccagtcttgcaacttatttcctgcatagtcttagtaactgaaactctctgagcctcagtttacctaataatccataccagatatttatatagtgcctgacttaaaaattgtagaaatcattgttgaaaatagcatgattctatatcttgctaatataaagtaagtatatagttacaagttttaaaacttttaaataacagaaccggaaactatgtatgtttaaagtatagcagtaatattctrttgaatacaaatatataaattatccacttttggagtggctcttttttttttggtcagaagatattatgaagcatattaattgaggtgttttttttttacacttgaggtctttcagtgaagacatttaaaataatgctattagttctattgactttttcatttcttatatcaattctggcacgtatctgtatcataaaacagtgagaaaaaagaactgtcaagttttatatcaggctttttttttttttttgagtgggaaagaggactggtgtagggaaaggagaaaagagcaggaagaaggctgtaaagaaagctatgatatgatattaaaattaggcagattgcacaagattgcataaaaccccatgccatctttctgctttggcccaaatgatttaagagctaatgagctcatgctcctgcgtcttcgactcttgtgttaccgttttatcaaaatgaagtatgaagkttttttgcatctggcttctcttttgaagtgattctaactgcggagggattgctaactgaactgaacgcttcaagaaagccaatttattcagctggttgcaaagcctttgaccttaatggtgggacttggcaaatcaatgcatacacgtatgtttagcgttctgtcaagaattgcgaaaatgctctgtaagccatagatccttctgcaaaatactagtttgtagtttagtttaaacattagtcttttttcagaggccaatgaggctagttaattaagcctgaggggttatgaactgttggcagttaataagtcataaaattcctccataaaacaggatgcaagattccatcactgaagcaaagagtacaaagagccggtgtataaatatctaattgtaccaaaggactgggctttctcaatgactgctcatctggagtctccagggcatgctcgctgtggtttcctgatttttagaagccagtttaaaaaatgagtgcattaaagggtaatttgcctgaaagttcaggaagtaaagggggtggtgtggaagcaggctgaaagggagaaagaaaagaggaacgtagtgagaagacagaaaatgagaaagaaagtggtagaaagacagggaactagaaatcagaaaggttgtctccacacaaagttagacatgactgtatttgtcgtctgttttcatttccctgtaggatgttcaccatggaaacggtacccagcaggccttttatgctgaccccagcatcctgtacatttcactccatcgctatgatgaagggaactttttccctggcagtggagccccaaatgaggttcggtttatttctttagagccccacttttatttgtatctttcaggtaattgcattgcatgattacccctaattttcttgtcctttgctggtgttttaaattacacgagattactgaattgtcccatgggaccaagaaccagtgcagaacaagtgcataacccagagcactgtttgtcagggaaggttgggctgatttgatgtgttgtttgatgtttatttcaagagctcccatgtgcttgttttcctctcttcttgctttcttccatttgctctcttctctgcccaccgtggtgtgtctttctcttcccaggttggaacaggccttggagaagggtacaatataaatattgcctggacaggtggccttgatcctcccatgggagatgttgagtaccttgaagcattcaggttggtacttctttctctctgaaagtggcaaattggaaaataaatgtccattgaaataacaccaaatatggaagagaaatgtaaatgtctaattaaggtaaattatcgctcaaagccacataagaatatgtataagaagaaaagatctatcaagacctggttttgattatacaggtatattggccaatggcccattttcccccttccctcccaaataaggaggaaaaaatattttattattaaatagttctctctggaaaattctgcctattttaacatatgatgtggtttttacagtagacattagcatattcattgccctgagaagtccttcattacctatttgattttgttgaacaagcatttctcaaacttcattggactacagaatcccttttttacatagcaccatttagcattcctagttctggggagctcactcattttcatgacattggccaaggcaatctcatttgatggtagggtaaatgacttttgtatagttttcctttcacatgaaaacattaactaattaattggttgcttccattttctctggaacaaaatctacaaaatgtaacattaagtacagtgtattcacatagcattctgcttttgtctaagcaaataactaaatattaatataaataagaaaaagcaaatcaaaggcttctctttgagagaattttaaaaatgagcatttcttctctggaattaagaaaatattagtttgtagtttaaacgttagtctttcttcagaagccagtgagtctagttaattcaacctgaggagcctcccttgcaagatttttggaagaggttttagcctattggtaatgcataatttctcgaattttttatttagttgaaagcaaaacaaccacatgaaaaaaacttacatgtgttcatagttttgaaatttgccatttataagttcccatgaagaaaatcctgttgataccctatatttgaaacttgtggaaataatagggaaattttttaattaatgaagttttggtgggtttcttttgtcctgtgtgtcatgcatacttcgttgtcttatttgaagttcatttctcatgagaaagcaggtccaggaaaaatgatagaaaaatagctatttaaaaaatacatttaaaataaatatgtttggcttggcattcaagatacaaaggaaaattctacccacattctggaatgtgtactttgggaaaaaatatacacaaagatatccacaatgttgtagaaaaaaatggctggaataaaattttctaccgtmaacttgggttgattgtgaagatattttgctttaattaggagcaaaataaaaaattatgttaaaaaacagaagttttaatgttatgaattctctttttcaacatcacaaataccattacatttgcaaatttcacaaacattattaatatcttgtaggaactttaacaggataatagacttcaatattatatcacatatgaatttatttgtctgcctcccaagttaacctggtaacttgcatgatacacattaaattcatgttaaatacacattaaattctcaaccttactatctcatataatcatatccattatctttgatgcagaattcatagattttttaaattatcgtaattccatttggggtactatagctttatataaaaataaatcatgtatgcacagcaatgaaaggcaacttctattttgtgcctttgttttcccatcacaaagtgagcggtggatgagatttttttctaaagaacctctttgaacacaaccattccattamataatgtaaacgcagatattaagtgcacatattgttttgtgatttaaatggtaaatgaatgaagtactcctgaatggggttgacgattctcagaatggcgccttctctttgcctggaaggtggacactttatattagcaaacttttytaagcttcccagtgtatctccattacttgagtttcattagagaagtggcattatctagctrggatgcagaaatgtaaatttctggctttcaatgtccatatttatttaagaaccagatttaattcataagactcctgccattttgaactatggcctgtctgctattcatcatttatgaccagaagtacttgtgaatttgttacggctaggtcaaacaggtaagtcattcatttcaaaaaccatcattgaacacatattatatgctgggcactgtggtaagcacttggaattcagagctgttgttactttcagggatcakaatatatgtcatacgtattattctagagaacagaagcgctcagagcagataaaatgattaacttgtcctcaatggtttcaggaaaggtttcatcaagtattgttcaacctgtgcttctaaagatgagtgggaactttcaaggggagaagaggagttggagtcgggggtattcatactgactgggcagagagagtgaactgtgaaatgcatggagccatgaaatgatctttctgtattggctcaaggacatgaggtgggattggtagaaagaaaatraatcatattttgtaaactcttatgcaggcaaaggatagcccatctatatatgtatatactcctttgtcaatttgggcttagtcagatagactgccaaataatttttaaygtagtattattttctaagcttatccttaatacacttcttgtttcctagtattgaaccagaagatctttctggcatctgtgtgtgggtgcaggaaatggaggtgggggaaagagtaaatggtgccttttcttttctcttagtttttaattgtttctggactcttacaagtatcttttgaaggaaaatctctctccctgtgaagctacatttatagtgggatgtaagatcgctgctyattttactagccaaaatttgtcacatatattgccttcatggtttctattatgtgctttttctatagcaaaaaaatcatagacaaaccaaagatttcacatttactgtaagctttaaatagaatttaaaaaatataatagaataactaaattatttcaaatgactagttatttcttccaagcagttatcattcatctctgaaataattgaagggtatacttaagattcttcacgagaattcttaaaatattcagtatcaaatatcttttatgttcaactaaaatatatttccgaggttaccattgtataaaataattatgactatttttattggggtcttacatgccaggtcctagattagaaactttatagacattatggctaattcttaagtgctttatataagtcacggaactactaattggaagggcagtaatttgaacttagtttgtgactctacaatctatgctccttttctcacaccacattgctactctcttctgtttatgacttaaaatactcaggagtaataaagcacagtgactttttaccaaagtgtaagaccttcatgcccgcatagcctcccaacctaaggcacaaatgcctagtgaacaacatggcagagaagagctattcaataatatttggttgaatgagtcaatgaatgaatgaatgaatgaatcagagaagaaagagggaataatgttgtcaatgggagcattgtcaagctcaggtattaagcgaacctagcaaaagtctgagggaactaccttggcttcttaaaaactatgctctacaaagaactctgaacatctattcattttgttataagaatgtcagacttgtctttattgaacaaatcttttgctgaatgcctgctaaggaatctctgtttcaatcatttcaaaaggatgttccaatggttttatactctctacagtccattgatgaggattgggcacattattttttctaaagactaattcttttaagagtactgcaaatgttaaagtgattatttatgtcagaccatttaagtggtttgtttatagtgggcaagagacaattatgaatctcatgcttctgtttaaatctgagaaaaatatcttcaaatgtttaaaaaataagtagcaatttccaacgaataagattttatttagtagtccttgaaattatgcctgttttattaaataaataaacaaatgagtgaatggaggacaattcctttgtagccccttttaatttcaagaaaagaaatataagccccttcaatttagcaggtcttaatgaaataattaaagtgacccatctggcatatactgaggactagctaaagaaaggtcatagagctcttgatctgggttctttagatgcaaacaagttctaattttaaatatcatcttttcatgtcagtatgttgtagtatgtagctaccttaattaatatttgttrttgatgcatattttcaatagacagtgaatctgtacatatcagctcttcagggaagttcatctcaggggaaaactctgacccagaaggactctcttgcactgaggttgtcagtatgccaactgaaaaggggactttgagagagttgtctagtagaggtagtgcacatttagtcaaaattttgggggttattattgaaaactacctatttttattttattgacttatgtaggtagtatctgtatttaatcgaaatgctatgtgcttctaaatttaggcattactaaaatattttggacatatcattaactggaatttttagaagcttaatgtttttgctatatagtcaaagccattgaaccatttgagcacatacaagcagcccagtgtctatctctttctcctgtcttgagttcatatctgtttactttaatgacataagcaaaattaaagtccattaatgcaaaattgtgattggaaatctgtccagatatcctgtctattcttagttcacagtcaaagtggcaattctgttcctgatgctgagtctttaatataagaatcatggcttccggggattcctcccctgcttgtgacaaaaatgtagaaagggcatttaactcaagtgyagaatgaaataaaaccttttattgtcatatccacactgcaagtgctccttggacaagtcaataatggtcagcctagagatttcttagaatggttgggtttaccttggaactatagtagataatttggggcagggcacataaataagttaaatatatttttctctcattcttattttataaaatatatcatcattattctggctaattcttagaagattaacttctaaatattcttgttatatgtataaactgaaaaagaggtttctaaattctatttaagagataaaatgggaccacaagtaaatatttgcattcactcttttggtaatgacaattaagtaaatactgtttggattttttttgttcttgttcttatttttaatattttaatataatttcatgataagtgaatgtagaataataccattgtaaaaacaacaatataataataataacacagtaatatagagtattcgttgaggctttaatttttgctagttgttyatttttttaaaaagcttttcaagtccttgagttaggtgcttttgttttccacaggcagttaccacgcttcttgagcttcggtaggtttcctgatgtcacacagctggtatatggtgatcagggcttctgaggcagcaagtgtgattttggagacagtactttgttggtcccaaaccatacaggaactgtagtccctgtgtcaagagtatgggataacaaaacaatcatatagcgaaaaattctttgcaatgcattttagtctatttaactttggcttggacatctaaactggtaagtgccccaaaattgaaaatttagactttcactacccttgatatctccaagccacttctccttgtgtcttctcctcatctgacatagtaagagagcctatcaaattaaacccttggttctttttttccttttaataaccratctaattacaacggggatataaatgttttcatctttgttaaaagaaatattcttcttatgtatgcatttagattttgtggaaaggatatgtaatagaacttgaaaataccaaattaaattttaatagaatatatagtgaaaaatgaacatttagatttaactttgaaataaagcatgatttcgttgtcatctaaaagtcatgcttaacaatgtcaaatgatttgggatcttaatttgtcaatgagagctgtggttgatgcttcccagtcttgcaatggattctcaattgttagtgacaagtaaatatattaagctcatgatatcatgtattttcccaaggatgttgaagacagtttgagaaagagggtggagtttcttgaaacaatttgccaatatgaaatactgtacatatcaaattggccctactaccatctttcccagaccatttatcatacctcacaaatccagcccacattttctctttctgaaagacttgactaataaagaagatgtgggcttcaatctgaacttgtcaatcaatcttagtaacaaagcagtaatgattttcatctattaatgatttatttcaataaaaagcaatacatatgaatttattgctagtgtgaaccacaattattcactgtccagattccattctctattttccgtatgttgagatgtttcaaaaagttytatcaaagcgggtcacaagaaaaaaaatccataggaataaatttgagaaagctgtcagctctatctgcttttcagcttcaaaaataaatatagtttaaggacattttttctctcatctgttcaacatattgtaccaattttcatcaaaaaattacaatttctaggtgtgtgtctctagatacccttagaatttctgctctttgaccctgagagtaaattgatcttatgcacacctgtcttcctagggaaacttgcaaacttgatttttgagccaagcatcaaagagatatgatattattagacagtatagagctcaggtaaaaagtccaggaagtatcttgaagtacttgaagttttgaaagggaagtgatatctgcagtgaagagctatttaaagtagatcaaatgctacaacttacttcttcttattgtktttaaaaggtcggatcagctataaaaattttaagacaatattttttctctgccttaaaatggttctaaagccaaaaattttctggaatctgtatagcaattaaacaattttccaaataatggggactaattaaaaggatatctatgtttaattcttttctctagaagttctttctaagaaaaaggtaatttgtatgcctagaagtgatttgtttttgttttgcagatgaaacactgaattatataacccttgcctgcacaaaatcctctcaatgtatgtgtaatactttgaaatatcaggaaatgaaatctttttatgaaatattattgtggagcattttaaggccagaaatagcagacattttggactgtcaaggagcttacgtcaattcattgacttaaataacctaatctagtaatagtggaattgtcgtgtagttaatgctgatatgagatggccagaatggaaggtaaacataattaataaattatagagtcacacttttcttcatagttctagtgaatattttagaatttgcttcatttactggtaagataaagctctcgctcaattaaaagttacttatcctttacttcattgarcagctgtttttcaaccaaatttcaatgtctttgggtcatagagtgaatttttttttttgaaactgagcaattaccctctttttctatgattttacatctaaagtttactactactagacttattgagatgacaaataatgtggaaaaaagagattgaatgtttgttttaatatactgtaaatataaatttgtagtcccttttttgagagctagataaatataatggcttactagtattaaaatttacatattgactttcccacgtggaggaatcatactcgtgaaaactttgctcaactgaaggtctgttcagatattacatctgagatgcagagctgaagttcacactgttttctgatgggcaggactttcagagagtagttcaagtctttgcatgacatcaaacatgtggatgatagactcaattttccatatttcatcccaatgatttgrtgtcatatagatggaacttataaatcaacatctgttttcgtttaggcagaaatttaaacttttctggcactattctagaagggtaatggcttgttcttgtatccattaggaatctgcccatctttcttgtgggcactgcagtactgggtattggttatctaaacatctattccaaagagcagcactactgtcgtaaagccatagggagggtggtgagcttatgaacgacaaagcttctagtgggaaagacttaccaaaatggcatttgtcccattatcactcatatctcaacttcaaagtggagagaagaggacaaaatagattattcagtccccatttaagcacagcagaattgtaaatctgcatctcaatttgaagatatttttacatcccaaaacacttgtatgaaaggccatcaagaaaataacatgtacacattatctttcccattaaagaaacatattgttgcacttgaaaataaaatgttggctcgcctaggatgtatatttttagctggttcttaactcttttaaaattaaagtgatgctggagttaccgaaatggactgaatttcagaaacaaaagagcatttttactggaacagaagccaaaagcaaataaatgaagaagagctcattcaaacccaagagcaagaatagaagaggcacagatttataatttgaaagttttattacccaaagagatctgggtttcttatccttctgtacttttagtttcagaaagtctcccagagctgcctcattaggcctctgattttgctttatatacccatgttgcctcccctgtagaagtttctgacactgtagattcttttatgtttcagtacttctaaaatgaaaacagcactgtagaaatgattcagtgatggcttcctttccggtaaatatgacaccgtcgtagtaggtgaaacggacaggaacagagataataaaatctgacgtgtcatattttactgactcagtttcaatgaactgattacattctaaatcattagaagaactgaagtctgccaaaagtttgttaatatatactatttagtttggttttttgagggtgtgacaattaatacaaatcaaatgattgtatgtagaataaaaaaattaatatgaaggaaggctcactcacctgttaatttactagtctcaatttttttaattaacaaattaatattattttgtctctcttctaagatacacacagaaggggagagagagggtgagtctggcacaggtctctaaacatactttagaagagaaagaaatcctcccattgtcagagctgagcataaaatctgcaccaagtttgaagggcttatgtggcccaatttaaaattttgttgttttataataactttggagaattgtattgttccttataaaatacccacatgttctcctttggaatagctccagagtgtaactgaaccacgaggttgcctcctggtgctttatgtattgtttaattgtttgctttggtggatgtttttattaaaagcttattatttaggataagaccaaagtgtcattttaagaacaacagaagcagagctgtttggtctcatagttctttttcataggtgtgttagtgaatactagatacagctaatgaaccagctgaaaattgttcttgtaatacttcacaaagagcaacaacgacaacaagcaaaacccttgatttttattttccttcaataaaacatgaccagattggctagaagagctaggagtctccatggctgtgtccaggcctcgaaggaagagaggtatctgtgggtgcgcatctgctctgtctgtgttttgttccaggaggagtttgcttggagtcacgtgcactgtggtacacaaggccatagcaaacctcaggagctgggaggcagtgaagcccctgtgtcacaagggccgtagtgggcttcctggggtgtgtaccaagcctacgaaggctttagtggatctcagaactacaaagttcttcatgtcctccctctgcccacaatttgattgcaagataattatcttagctgagatcattctgaatataaattaggtctgggaaaagtttttaattcaatgattttaattctcaatgttcttctcctccctgaatattttcttttctgaagcagtatcaccatatcactcaccgactcctcagaagttggctctggaaagaattcataatgttccctagcagttccttgccacaaagagcaagcaagagtttgattagtccatgacttcccaagctagtctttgtgactgggacccaccctcagacaaaaaacttaaaggcaatataccttgagataatttctaggacttacatgacctcattaaattccgactctagatcttatgtagacatttgaggaaatatggttattgacaaaatgtaagcccattatagactatatcacttcaaaaggagaaaggccattagaacataattacatcagaaacagtatacacgtttggctggtttataaactgtcactttcagaagtacgaagacttataaaagtttccaaaggttccattataaccctatttccaacagtattctctgacaaactaaataaattactgcatgtattggacctttgaggcttggggcaaagaatggaaaaattatttacaaaagcttgaaaatatttaatcactagaggcaggggggcaacggtgttttaattagcaggtcctcgggccattggctgactagaggctttctcaracaaccacacaaatgcactgaatagctgtttgccagccttagggtcaggcctgagatgaaacagataagataattggctctaatgaaatccagaaggccttggctttcttgtttgagcttggatttgaaaagtgcgtgtggaagtgaggcttaattcaaaccagaactgagctaggcccrtttctcagtgactttgatattgtttgaagttctaaaagtgttcgccacaccactagcctgctgggctgggcctccctggtacccttaattactaagctttattgctgactttactacacaggaaaggggccattatatgttccatcaacatcagctcttctcagattggaggaaagggcagggttaaaggccactgtaggaaggcaaaaacttcactttgaggtagtcagatcatttaccagtgttgaatttcaccgttacgcacatacattccttacaacacagaagccccaatttccattttttaaacaagtgattacttttcaaaacatttttgtttgtgcctttttttctttttcctttcttttttttagagagaacgtttatttttaaggactgaaatgattgcacatgatacactgaaaaaaaagagtacaacacctcccaattaatcatcacaccagaaggtctggttggattctgtaataaggaggattattattaatgcccctttgaagtggaaataagtgaggaaccctcctgtggtgtgagagttgtcctgacaccctgaggaataaagacgcctcaggagactctacaaaattaaatcccagcttctagagtctctcacaaagtggttacacaaaagkgctcccaaaccagtttgaagccaagaagcaaaaacgaggaagtctccccctgaggggtcagctgtggtgttactgaggattccatcctccccattctggccgctgctctgcctttggtccaactggtaaaatggattatgcatacatatgaattagtaactattcaacacttacccctctcagatgaggagatctggttatgctatgaaagccaagggacacggagtccagtcctatttcctgccctatttatcacctctggttaggaaagtcatgagcgattctatcagacttaactcgttatgaaagaacaagttgagtatattttgcattatttaagtaaacttgacattaatatgatccaatttcatccatgatcctgctaaccatttatccaatactcttttctgggtattgttatgcacaggtggactgggtcctaggtctccactaggatgatgtgtgtctgggcctaaggaaccatattaggaacccagggagaccagtattaggaagacaaaactgagcttctgcttcctaacctttcctaagcggaattaaggaggccctatacaaatttttgccagtgatgaacatgatatcagctctgatcagaagaagaatctgatcatactcagctcgttttaagtatgtatgtttttcattaggcactgttattgtctaaatgtttgtgttcccccaaaacatgtatgttgaacccctaaccctcaatgtgatggtgtttggagctggggcctgtgggtggcaattagggttagatggaatcttgagggtaggtgcccttatgagcagtgacaccagagagcttgcttccttgctctctctccatgcacacacaccgaggcaaggctatgggtgcacgcagcgagatagggctggttgtaatccggtgagagcgctctcatcagggcccaaccatcctggcacactgacctcaaacttctagccaccagaactgtgagaaactaagtttatgttgtttaaactactcacctggtggtatttcttttttaatggcaacctgagcagaataagacagacactataaagatctttaatatgagaaaccaagcaacccactaatggacttaaattaccaaaaaaagtatcttccaaaccatattttgctaaacactggatacaagaaatgttaataagtgtttctcaacaataaagaatatcctatagggaaaaatctctaattgaagacatataatatgtaaattcatgttaacaactgcaggaattccagtagtaattttacattatttaatgcattcttcctcaaattatttgaacatgaaactcccagctccccacatctcttcacccaacatctgtaagtatcatgaaaactaacattctatagaacacagtttgaaaaattctgatagatataagtagcaaacttagtgggcattttaaacagtccatcgctaattcagtaaacatgataaaagtaagtaaaacacatctgcccctaagattctcacagtcactttagtaaaataagtacattatattacatgtcattataatattgtgttatcacataaactgagcataccacaatccatattctacggactgtcttctcctttttccactgattacatgtgagtggttcttagataacacaccctaaagacaaagaaagaaaggaagagaaacagaattaacaagagagggaaaagagtgtcagtttcctttgctatgactattaaatgactcagtgaattttcttagggtaaagttactgccattcaaaattatagtaaattggtaatattttacagtcatatattttttgtttcagctgagtatattttgtttcagcttaagtatgggcacatatctcccacacttttttagatcasatatgacacataaaaaagatggctttggttttttaaaaactcttacaattagcaactaatggcagtgtgaacatataattggttttataggtaaatcaatttgtcgacttacaaacttttaagacttcatttgttattcataactacattttgctgaggaaaaaaatacttgtttatgtcaaaaaggggagaatttccattaagttcatactctccatgatgagaaagcacaccccgaaataagacattaaatgttagaatgtattacttttcctggttagaaaagaacttggctttgggagtggaccctatgcgtatcatggtgtggcaatgccattttgtttccaaagataacatttgtagatgtacagatgtcctgaactttattaaaccacagctgtggttatcacatatttattcaaaagatattacagctatcaaagcagtatgtcagcaaagtccttagtagtttgcttaaattgccctttcattttactgtatctgtaagtattcaaccaatgtctttaaaagcctgagtaaaaaaaaaaaaaaaaaaagaaaacacaaataagcaaacacgaagcattatttacatggaagcattcagaaatcatgaatagcattatcacaaatgagttatgacattttataggttcacaaaaacgagagagagaaaaaatactttccttgaatagcacaaaagcatgcagctttctttagcacattgattcttattccaacgatctgaatgtggagtgtgcttggccaatgatgatgtggctgaaatatgcaatatttatgaggcacagacccttgtacttcttgttcgaggaraggcagaagtgtgacaatgtccttccaaaaatgaaagcgtaggggaggattcttccctggaataaacctacagaatgctttcttctgtggaccattagtagattttttcctgagccaaacataatgaagaagtattttttatctcaaagctcaaaacctctgcatctattgtcatattgtatttgtcctcaaatatccttatgaattggacatgatacttctgaaaatcacacaggaaattattcacatgtctagaatagaggcttccctcgccattaattcaaaatgggaaaccgagtgcattcctgtcttgcttcattaaggctgctgtcacaacatatcatggactggatggcccataaacaacagaaatgtattttgtacacttctggaggctgagaagcccaagattcaggcgtcagcagaatcaatgtctgttgagggctgctttctggttcatagatggcaccttctagctaaatcctcacatggtggaagggtgaggcaactctgtaggttttctttcacaagggcactaatcccgttcttgagggctctgctcccatggtctaatcaccttccaaaggccccacctcctaatatccgtctgggttaggattttgacatgtgaatttataggggacacatttaggccatagcaattgccaagacaaacatgagtggattttgaagagtagtgagaattaaccaattcttgtggttgcagtgcttccctttgcctagcagcagcaggtctctgctctcaccagatttccatgaggagcagctgagctgcagtatctattcgctctactttcttgggtgctgatacggtttggctctgagtccccacctgaatctcatctcgaattgtaatccccatgtgtcgagggagggacctggtgggaggtgattggatcatgggggcgatttccccacgctgttctcattatagtgcttgagctctcacgagatctaatggtttaaaagtgtttggcagctcctcctttgctctctgtgtctcctgctgccgtgtatgaagtgccttgcttctccttcgcgttccgccatgattgtaagtttcctgaggcctccccagcaatgtggaagtgtgagtcaattaaacctcttttctttataaattacccagtctcgggtagttctgtatagcagtgacaaaacggactgatacaggtgctctacgttcgtattacctcttagtaattatcgtcttttatttgccttcccatgaaactgcrtttttaattttcaaagagtggacttgaaaggttaagaacacatttgtacgatgtgcttttcctgaaatgttagttagtatagtgatttatattaaatcatccaatctactttttaaaattccattaacaccaaatgtctaattattcctgtcttgtaaactgcatttatgaaagcaaaccattttccgtttttctttcttttacggaaacatccaatcaaagttggtttcctgaatatttagattcattagactttcttcatttgtaaaactataggagcagctactcagcaatgccttcttcgctccttgcaggcaggtaggtgcctgtgtgggaaataccttaggaaccaaggattgttggaaacttgtctttagagacagtccttctaacaaggctgctgaggggtgcagaaatggtacacctctgttctggctgcttgatcagtgtctcaatttagcctttggtgctttgaggtatctttcatgtgcgtaaagctgccttacragtagctgactttctcccatgtgcttaactgagctagttgctgtggagaaaaatgcagaagcatgtaacagtcggggctgggagtgagaatcactacaagacaattagagaatgagcaaagcctgatatattgaccatgcactaggagaacaaagataagggaaaggactcttaatccaagtcttgtgagtagcccagtgtcctcctggcatgtccaggaacttgaggacgattagagtcaggcgaggaggcggaggattatagacatactatcattcctattctgaggccaggcctgatttgtgggtgttaatcttgtacaattacagaaactctctttcaaagaaataatacaaaggcaaaaattcaaaaataggtacagggacttggaaaaggtccatgtgagtgagggactttgaaaattaagattcattagctttatggtaaatatgccttggtacatatagtcctaacaccttgtattgccattaattggagtgaaacaatggacactgcaccatggaatgagccttaagtaaaattaatggctatgctgggtagtgaagagaaacagacaaattctgcaaaggtgggggatttcttagagaaactgcactgacagggaatgatcttgacataaaaattcaactgggatacatttttcatctgagggcacatgctgaggagatcaaagtaaaggagctttttttttttccctctctttctttccagtgtatgttaaggtagatttttaaaaatatatataagaagaaaggatccatcgaggaaaaataatgaagtcaatccaaaccaaacaaatcatagtaggggtgcggggagcaaccagtatttacatggggagcgcacactcttcttttgggtttggtgtgaagggtcttcacctgtttgtgaaagtgttcagaatgtggactgaggctagtccctgagtcggcctggctccgactttccaccgaaggggtagagttgctttaatgtggttcacgtgtatggtgtttcatcttaagcagagtgatttatgttaatgaaatgaaacagaaaaaataccctttacatcctagtctccttaaaaatattaaataaatatgtccaggacttttgcatgattatatttattaaaacaaatggaagacttcaatccataccagaataaatttgtaggtgaccctggggagggttaaatccattaggaaaaaaaaatgagtttgggggtttcttaccaattctgaaaagaaagtttttaaagccattaagttcagcaatataatagatggttacaaaatgagcatcaattgtaagataatttgttctgtaatttagaatattgttttgtttggcttctgaaaatttaatccccaaatcatggttcacaaaatatattcagaacatctttataaattgaatactagacttcttactgtgttaatgagaattaagcatgtgccatctttaaagtacctatttgaaactgttataatttaagagttcagcttttaattgtttgtcataactgttctactaatacagaactagtcattttaatagaacttaagggcagcagaatcttttcaactcttagatttcattagcgtgcatttacctatacctttacaacatgattatataattaaatttcaaggaaattaaattagccaaatgaatacattttaaaaaattagttgattggcatttttctcagaagttacctatctgatgacaaacattagacataagaataattcacatgtctggttatcttaagtgttgattgaattgtaatttatccagctgactgtaatatttagtaaaagtggaattagccaaggaaaatgtagttcacttgcttggaacatagtgacatactcttaattcctctagtataaataaatagacatctatttttgaaatactttttaaaaacaaggttaagaaagtaatacaataaaacttctattttaaaaatctttctgttcattgctatgtgggaagacttcaccagaaatgtaccagaaattttccttaatgtgatgtacctgtgggtatttggcaagcatgtcacttggcagatagttgctaatatggagcacaagaaaatgaaatgtaagggtacttttaaaacacattcctgagaaatgcttagctctatctgccaggtgatatatcatttactgtcatatattggcagctgaaaaactgaattttatttttgctgtcttggctacagatattatgtaaattatattcttatggggttcaaggtagtgatcatgattgtaatgacgttgataatggtcatttaatcaatacagagtctgtcggtgtatcttactgcaaagaaaaataagtttatggtaattcaggtgtatttccaattaaacagaaaggagaatcagaagaagagtcaataggagggtagagaaaatatagaaatggctgtaagagaaagaaacaaagagaaatagaggacaaagacactactctagtctagtatgggatgctaaaagaaaaaaatactgaatagagaaaagtataaaaagtctaatagaagagtaaataatcaaattggggtaattttttaaatgggtgggagtaaggagccactacagcaagaaaaaaaacaaaaatagtaaatgccattattttcaataaatgctaaaatttatgaaaatgggattttatcacggtcattgacgttatagcattaatggtctatatattttgacagcgtacttaaacccccaaggtaggcaacatggtgagtgcctgcgtaaattggtcagggcttgggttgttattgttaaatgttttgatgatcacctaggtttaaaataatgctttcataatataatgggaaaatggatgcaattggctgctaagtgattggcgtcagatttcagaggtagtatgaattagctagaaggcgtcccttaatctcactgcactctactctccagaagccgtctctgaaaccagagcagtaataggacatgtctctatcacacaaccaatgaatgtcacaggctggttttaagacttccagctcaggacttgctttacactaaattacgtgmagcagacattttccaaatatacaccccctaaagatctatygcgacctagcgtagtgttattacagagaagggagttggaaagattgactgattgattagtggccattctctgtaaacctgacataaatgcacatttcctctatttacagaaaatagttgcaattgttattttattattttttatcctggcccatggtcagtagctctatccacctcatttctatcattgctagagtcttttgctttaagtcttcatcatgagcatgcctttcctgcttgtcctttgagaacactgttcacagttcatggcactgactgtgtttaggcatggtggccgtgctgaacttgagcactccttttcaactgcctgtggtttcaccacttcttaatatgttaaatttatttaggctgtggttgttagccccttatttttctgcttgctgttctgtcagttaatgtttcccttgcataggtcagaaggtggagaggggaagaaaagagggagaagggattcttagccaaatccaggtcaagctgtctaaccaaacggtagctgattctattaccaacttggtctctgtttcccagcctttatggtaccaagagacttttgcagtaatggaaacattccttcttttacttctgtgcaccgtcatcttccttgacttcatgcagagaaacacaaggagcaaaataattgtaagcattacagccttttactctaatgaccttgactctgcactgggatagatgtctaattacaaagaattcagcacagaccacattagcraggctggtgtttgctttgcacacagacccaacatctgttggatctttggagcagagatttagtcatgggagatgaatcctgctgttctcttaaaatgcatgctttgaaaagaatgctcttataatattttggtcctgagagatacggcatcataggttcacgctaaggctcacagcccctaagaaattatgagtaactgattagatttttataactgcagatsaagtccctaaaataagaatctattcttatcttagaaactatgagtattatttagaaaccatgagtaactgattagattttttaactgcaaatcaaacccctaaagtaagaatctatccctaaaaatcaaaatctattttgctrttttggtcactataatgaacagagggagttgaacacatggttatctctccaccactcatggctgctgcatagaaattgcccctaaaggatgttaatattattgattttataaactatgtaggtagaacctctatttttcttacactgaacttggagtgggcaaaaagaagcctacaaatgcattataaacattgcaaatgtacattatgaatgtatattacaaatacattacaaatgtgcaaatgcattagtagcttcccttaatttcagtttatgagtttgtgatataaatggcagggaagaaaaacatttgtgtgcatttatctttggaaatagcacaacttatttaatcaattgctttctattaacatttttttggtgaatgtgaacaatacaatcaaatgtaacatcgatttgggtctctgtgattttccctgtcacctcaattcattcccgccttttctccacattactgtctttccctgaagcataggtagtattcatttgccacctgaatgatcaccgctgggtcactgttgtgaaaccataaagtgccttgaaggaaatcacagtgcagttattcagtctgttcatatattcttctcctacctctcagctttatctttttctttctccgatttcttcagtccagctttcaactcttcactcccatatatgtcatgtttcaacttcatttaaatttttatctttttctctatgtgtcatagttttggtaattttatgactaaaacatgcttttccttttgtctggaagtatttattttctttcactgaataattgcttctcttyttttatttttttttaactgtgttrcagcacataaaaagtttatgaaatcaattcagagggtcaagattggcattttaatagaatgtaatagaagataaaagagtgtcacatattgtttcacaaaatatgttttagttgtgtgtgtgtgtgtgtgtgtgtgtgtgtatgtatgtatgtactagttcctggagtgaaatgtacttttttgtttgttgtggtttgagaattttgaaagccactgtttaaacagccaattaaaatatcattttatctataaagttttgtctctgttctccagaataattaataagttcattttctatgtccacatttatagctgtagtttctagagtaattattgttttgaactgggagaaaaaaatcaatatctgtattaatgaacgcatccctttgaactggaagaaatttgtttacagagttgcttcatccatgccatctgaacttgttaagtataggaatcataggaatctgtcctgayaktatgaaatctagcacttggcaccttggcattgagattcactgtagatgttcaatgaatgttccaggaataaattaataaatgaaaaaatctatgaaaagacaaacttgacaaagttgggttcagctattttgttttcaaatgggaatgtgacattcccattttcaatgggaatttgaaaatatttatmtaatatctgctacttgaaaagatttttaaaaacaagctaattttttaaatatgagggtacagtactgatgtactaataactgtggagtattatttggtctaaaacaaatacacatgcacaaaagaaaattagttttcaaatgtttatccattgaaatcttggattctgccggctgtttagtggttcatttagcatgtcacagtatcatgacagcagtgtcgaaataccaccataacattcccttttcaaaaaatgaaaataatcagtgagaaagctagctatctgtgcatatggatccacatggttgcatatttggaaaaatggataatcaatgtattactcaattcttaggctgctgtgaagaaataccctagactgggtagtttataaaggaaagaggtttaattgactcacgtggctgcatgttctgcatggctaggcaagcctcaggaaacttacaatcatggtgggaggcacctcttcacgaggcagcaggagagagaatgagtgcccagcaaagggggaagccccttataaaaccgtcagctctcatgagaactcaatatcacaggaacaggataggggaaatcacccccatgattcaattatctccacctagtccctcccatgacatgtggggattatgggaactacaattcaatatgagatttgggtggggacaccaaagtaaccaaatcagcttatgttaacatttcctatctagaatgtttgaatgtactttactcagaaattgctttcatgctaatccaagtgacaacccatagtctaactaatcagagtatatttttatcttaaataataaaactactctatcatgtcaccatggaaatttcgtactttgtggagtgaacattgcagttggaattgtacctggaaataagttgctgctgaataaatattgacagcagtgtctcatttttaccatgtcctgatctcctgtgaagtttgagtggcatacctacttcccttctaactcacagaaacactgaagtgattgcttcaatacacatgatatgccttcattgcctcattgaatcagagcacttagaaacactattttttcatccaaaaatgcagttaaaaggcagtgaaattgtcaagcttccgagaacgtgatctttggattcagacagatatgagtttgaatcccaagtcagtcagttatttgctgaaacaacttgactgattatcttaccttcattgagtcttagtcttactgtctataattgggatcaaagtacataatttcaagtatattgtgatcattgcaacattagaaggaatgtataaacttcttaacttcatgcctggcacctagtacattgtcaaaatggttgatgattttgttgttgttgctagaagaaaagagtttccttgcctccaacataaactatttttttagttttggaattaatcctactctcctgttattttagctatgaatacatgtaacactcctagatcttgggctgatctcctgattgagaagacagcctgactctgcacttcagaactctattcaggccccaagttctttctttcttctcagtctctttctggctatgcctcagggaacaagtaaaatgtgttactaaatgagcttgccttttgtcttgttcatctcacattgctacgcaattaaaaaaaaaaaaaacttgatgatgctgccttcctcagaaaggccacatcaaaaggtagagttaaccaaaaataatacacactttttccaaagacacaaacagttccttgaaaaggatgtcatgctgtaatttgttttgtgaattctataaaccacagaacatttacttacagtaatgtttgacctttctttttccttatttttatgcctacaaagcttctttttctctcctcttgagaagaaatataaaggctaacgctctcatatatatatatatatatatatatatatatatatatatatatatatatgtgagagaatgagagagagagaaatatatatgattttattggaatactgaatttaatttttagccaaagtcctttggctttatgcaataatattttatggaatgcaatcacttgtgcaaagactaaagagaggctcatttgaaactttgcaaaaagaatatgctgctcatagggtaatgggaaatgcaatatgtgtactaagctacacactgcaccccaccgaaaggagagaaatccctatgactgatttgatggtagtataatctctttagggattttttggataaagaaagtaataacaaaaaataggcacataattaagtttccaaagtgcacgtgtcaccagcatcttattgtccctctggaggggaaatttactaatgacttgggtagacatttttcctgctatgtgcccaactgagaaaaaaaaatcagcctttccaaattttctaaataattctctgctatgtaagttttaagaacattttactgtcatttgtgttctattttctattcattatggcaatgttttacaaccaccaggttgctatagaaatgaaaataaacaaagatttggaaagatacatgttgcaggggcttgttctgcctctcttgcctaaaccatgaggattatgttattctttaaatatactttcttccttggttatccagttggtcttaatataaggaaacaaagttaaatactttgttctgacttgtgtcaaatttttctcaatgtcttaaactcttttcctgtcctttaagaataaattgggctaaaagaggataaaattagaaggaaataaaggaaagaaaaaaaggaagacggaagaaaggaaggaaggaaagaggaaggagtaataaggtaggcataagataaaactaaaagttgctatggagctgacctccttgtcagcacccactggaactataaggaagggtgtattttattgagcaatcacaggcaattttgaaggggttcaagaagaatcagtagttctagtgcattatgctggcaaagacccttgcccgctctccacacccttgtagctcagcctcagttctctaggatgtggtcttttgttaattggatagtagcagagcaaagtcgggactactgatcctttccagctctagtccttacaaatatggaaagactgatttagtaatgcttatgaaaccaaatacataacagcccctttatgttactggactcacatttgaaatcataataaaatatttcttgagaaccactgttgcaaacttaaagacacatttttggcatattaaaattcacggtatttctatgcttttatacaataatgactgggaagggacatatataattacattctacatttctcagcaaaagagtgtttacttcagtacaattttaatattaactcttaatgacttctaccaactccaaactaagcatgtttcaacattttgttgtttctttctagactagatttcagtacagagtttaacgaaagcaaaatctgttaattctgttgtcattgttttatatatggtaattagataagaatcagtttatctgttttgataaactagcaatcttaccattttgcccagctccctatgcttgcgtataggattttgcctagggaggtggcatcattctctattcagaggcgttccaaatataataatataaatacactaatactattctcacagacaatgtcccaaagtcaggaagagatactgttgagaaaaatttctctctcaactcttagctcagagacacattgggcaatatctcagaattagtcagaaatgttactggctacgtgacacatcttaggcaaggaaagtccctcattgccttcaaatatcattattttttaaacacatagcatttaaaattagcattggcttcttaagcactaaagcaatataaacttactaaatgtcatatttgaaactctaattaaaagaatacactttctggaccaggwatatatgtgagtgtacacacacacgcatattcctaattatgatatattgcgttacattatgatgtatatgtgctatttgtttgtagcttccttattctcatcaatgattcatttaaaagcacagagtactataattaggattactattttgatgtagtgaaatgatatggactcacaatgtcacatttagagctccaatctctttagaagtgataatttagcccccaaaatatagcttatacaaattttgttcttgcagtgaaatagtttgctctccactctagggtctagcgtcatcaaaggaaagacacactttagaatcgttctgaaaggccaggggcaaatcagtggatatgtaggcaaagattttgatcagcaaggatgctgagcttcaggcaacaacttttcttatcaaatgcaagagaaagagaatgtgaagggggaaaaaagtgtccctttggtgtattagatctggaacatagaaaaatcatagaataatagagccgcatatgactttagagttaatctaaatgaatccccccagtctcatataatagttgaaactaagacaatttactaaggttacccaagtggaggcagtgccaagaacagaaattgaatatcttgagttggaatcaagtgatttttctaaccccctacaattgtacactgaagccagataattcaattttgagatggcacactgtagaaatcattgcagaatttaaccccctttttgaagacttttggagaaacctcacctttccccctctccatctggttcatacagtgttccaatgctcatcagaggaagatggttagagaatgttttcctttatactgacagagttcccatttggataattaatttgtaaaaatacagaaaaaaacctagctagcttagaagcatatctaaatcaatgaataaaaatagggcaagataagaggaaattcattttgagaagaattatgaagacagaaagagaaaagctatgtagattcaggagaatgcaataaacaaaacatggaaaaaatagaagccgtatcatatatatgtcacattttctgaaggtgtgaaaatttttgagcccaattttttccttttctcctcattacagtagtataatttctagattaaaaatgaattaaatgagcatttgcatattcttgtaattatcatccccattctgcttttgtgtctggagagatttggaaccagctggacaagagaggaaaggacgattttctgatgtttgcatttaaagcaaaggctcataaacagtgaagccacagtagaaatgkgaatggcctttcactaaaagagggattttacatacatttgtgaaacgtgcagaggctgaggaagagtgaggcaccaagaaaatctgacctccaaacacgaaaaaccagagagggcatcactgggtataacattcaacaactatttattgagtatccaccatgtgctagactttagcttgtccaacccatggcccatgggccacatggggcccaggacggctttgaacgtggcccaggatggctttgaaygtggcccaacacaaattcgtaaactttcttaaaacataatgtttttgtttttggattttattttttagttcatcagctattgttagtgtcagtgtattttatgtgtggcccaaggcaattcttcgtcttctaatgtggcccagggaagccaaaagattgggcacccctgtttggacactcttttaggtccccaaaatacatctgtgaacaaagagacaaacatttcttccctagagaacttgaatttagtgggaagaagcaatgaaaaaataaacattggacataatatataagtaaatcatgtatgactttggaaggtaagtgttatggtgaaaaaaaaccagaagagaagagttaggaatgacagaggtggggtaggcgtgggaagggttgtcaggagaaggtcttactgaaaagataatagacgactaaaggtttgaatgaggcaagggagctaggcctctggggaaaatcattcaggcgaagggaacagccagtgtgaaatctccatggccactgtgagtactgctacaatgagcatgggagtacaaatatctctttgagattctgatttcgattcttttggataaacatccagaagtgggattgctggatcatatggcatttgtattatatgttttttaaggaagcttgcactgttttacatagtaactgcaccattttacattctcaccaacagtgtacaagtgttccaatttcttcatattaaacaacttaagtgtccctggatggatgaatggataaagaaaatgtggtatatagatacaatagaatattattcrgccttgcaaatgaagggatcctgccatatgtaacaacatggatgaacccagagacattatgctgagtgaaataaggcagaatcaggacaaatactgcatgatttcacttacatgaggtatctaaaatagtcaaactcatagaagcagacagtgcaatggttgccagggactgggaccaggggaaaatggggagttgctcaaaggatataaagtttcagttatgtaggatgatgaagttctagagatctgaccaggggaaaatggggagttgctcaaaggatataaagtttcagttatgtaggatgatgaagttctagagatctgctgtttaacattgtacctacaggtaacattgtrttatacccttaacagttgtttaagggggtggatgtcatgttgaggattcttaccacaattaaaaaaaaaaaggaaagaaaaaaaactragaggattgggagtaaacaaatattttatcacccttgaacctcccaaaatgctctacttacagagacagaaaytggaatggtggttgccaggggcttggaggaaggggaaatgggaagttattgagttactgtttsacggttacagagtttccctggaaagatgaaaaagttctggagttggaacggtggtgatggttgcacaacagtgagaatatatttaatgctgccaaagttaaatggttaaatacttaaaatggttaaagtagtacattttatttaatgtacattttaccacaataaaacttttagttgttaaaaaaaatccctttgaccgtagtgtgtcaggcatatttgtgaatagagtcctggccaagcttcactgaccagagactcatgggtcattaaaacaaacaaaacaacaacaacaacaaaatttgcttccaccagaagagaaatgatgaggatctgattaaacatgttaagctggccggctgccattttgagaacagagtacaggggtaaagaggtagtatgggcccctccgaggaggccatggctgtgatccaggtgagcagtaaagttggcacaggccagggtgagaacagtggaggtgtaggaacgtggtacatttctggatatattttgaaagtttgacaataggattccttggaagattggctttgggtttgagaaagagacagggagctgccaaagatgaaaaattgaggcaataaaaaagggagtggtaaaagagagaagggggcaatgtgtgtgtgttggtggtgtgaagagttggagggtgaatgctaaggaagaagagcaggacttattcaggtctgggctggtggagctagaggagaacaccaattatacctggtgtgcttagcgctcctagtgctgacgcttttccacaaatgcccatggtaaaccttcatttagtgccccccacaaggaccctacagggcctgtgttgtgtgaggcactgggggctgttctgcagcactagcagccacaacagctgcctggaatctgtatagacagttctttgatgtgctgccttcaccrctttgggagcctcttttccttgtacttcatgcacaaacataggtgaatgcatgaaaaaatgtgcagtctrtaatgtgcatttttgtttttgccagaaaaacctaaaagaaataaaagttcttgtaccatttgaaaaggtataattttataatatgatgctttcatgcaatgacatacaattagactatagagaaaaaaggtaggcttggattttcacctataatttacatttgcatgattataatatgctattataaattatacaggggatcagaatctgctgtctcagaggtgacatataagatcatataactgcctactcaaaacttttgagtttccactcttgttcagaatgaaatccagtgtcctcrcagtggcctacgagatgctacatgaactggctttatgccacctttctcatcccatttccaaccatctttcctttcattcactttgtgtgagccacagtgacattcttttgatgccctgartatgtggaagacccttccactgcagggctatgtccacctcagaatggccttctctaggtacccctgtctcaacgtgcaccacccccrtgactttctgtacaatttgtttttcaccttagtccttattacatgcttacttgtttatttatatagtgtcttgccatgaaggcaagagatcagggactttgctgtgaaccctggcctataactgatgtcctaactcactttacacatcctctctggtggactttcacattgtttcttccttgttggttgcccgctctcctctgtccctcagtacactgtgtgtgcctgggtttgttttccacctgcctttccttctaacctatgacctttttgaaggcagagttacaacatatttgcatttttgaatcccagcaccatcccagtgcttcccatatggcagggactcaataaattacttctaaatgaatataaaaatattgttgagtaactttataagttaagatgttgtgaaatttgctttataattttgagttgcaggctgtggaaccaagccaaagttctggtcctatgggagttcccttcttgcaactgagcacgtcaaatgagtgggtagcgtcttatgccgttcactcagcacatgctggggtgagtcatgggaaattactagtgtggttcaacttaaggacaacacttgactcaatgtcagtgcaaccaattgtttggccattgactagagatgaaatagttccagaaatctgattctgaggaagttcagaatcagaatcaattgttccaaatctcatggaaagaaatttaaagtggaattcttttctgcttactgtgtttagcatctagtcacatgatttgtatctctttatgttagtggtagtactctttctgtctccttttatttttataagtttggtttattctcactagcatgggtttcaccaggggtggagacatgcagggaagaaggaagagggttgttcttcaagaagagcatgacagaataaccattggtaggtgaggacaaaaaagcatatatgccattgttattgcttcaatcatgtgttttctagcaaagcaacgtaggtgcaaatcaccagtgaatcctccttattctcctacgatggcatatccactacttggtcccatgcctcattctttctttgatgcactttcttgctttgcaaaagtacattgtcaagtaagttattyggaaagggagcattgaacataaatttctgagccctaaaatgttttaaagtatttaagtcacatacttaaatactagtatgtgatagctgcaagcagcattaaagtttaaaaataattttccctcagaatgtaaaaacattcagtgttactgattaggactttgctgtcaatatcattttctgattctttgaggacacgttttttctttttaaggctctcttaggatctgacaagtgtgtattttttaaaaaatacgtagagcttcacactggttggactaatcaaattcatatacttgagtatttttagttccgaaaaattatcttctgtcgtaagttgatcatttcctctcctctcttttcttgggtctctcagggactcctattatttaaatataggacttctgcaatgaccctctgtgtcttatattttcccatctattttatactttacctatttgcttcctcttctgggcgatttcttcaattttatttcttcagatcgtctactaattttttaagttatgcaattttagtttttatctttaagtacttcccttgttctttgattgttctttttcataacagcatgtctttgtttcaaggctaaaatattttccagcatttctttgaaattattatgtttgttgtctgaactttatctgtttcgttaagagtcttctatgtatatgtttgttttaatctttttttttcttgsatacaacatggtcttcttatatgccaggtaatccctgattttccactcatatttaagaaagtagctagtaycagctttccctgtggttgtataaatgggtsarttgagtgtgtgtggactgtcaaaccccactttagtgttagcattctagaagatagcagctcttggtctctggatccccmtaaatgacaaaataaggaggactgtgtgttagagtcccagtatctacattagaagtcttagctttgttcacacacatacatacttttctttaagaaagaggcaatctgagtgtgttgcttggttgctggcatcaaggaaaggtaattaaggcgttgggatgtagtctgatgttyttaaccgactgacacttttttaatttcttgttttaagtcctgcctgttttctgtcaccatacccatttcctcagtggagtatatggtgttaggacatacattagtttttttctacagttcctggctcataactcccatagttcttgctacagttttttttcttagtaggttggtgcaaaagtaattgtgttttttgccattaaaagtaatgtcattaaaagtaatataatgttgggtgtgctaggcttcagaggcgggcctctgatcttctgctttcctttcacctgtcccaaggcaggactctactcttcccacccttcttattgtaggtcttaagaccctctctggaatgaaggaatgctgagtgtcctgaagctttcataaaaactcaagaggactggtttggagagcttccagatagttagaaatgtagaggttcctggagggtggcattcccagggagggcatggagactccatacgccttcccccataccttgtcttatgcatctcttcatttgtagcctttgaatgtcctttataataaagttaatgtcagtaagtgcttctctgagttctgtgaagcagctctagcaaattaatccaacccaaagaggggggcatgggaaccccaaattgaagggaaattcctggactcacaattggggtgtgtgtgtgtgtgtgtgtgtgtgtgtgtgtgtgtgtgtgcggtagggggaagggccttgggagagttgtcttggtcyggatctgtgtcccaccaaatctcatgtcaaaatgtaatccttaatgctggaggtggggcttggtgggaggttkattggatcatgggggtggtttcttatggtttagcaccactcacctagtgctgttctcatgatagagttctcatgaaatctggttgtttaaaagtagcacctccttcttctctstcttcctcctactctgccatgtttgtaagtttcctgaggcctccccagaagcctagcagatgccagcatcatgcttcctgtacagcctgcataactgtgagccaattaaagctcttttctttataaattacccagtctcaggtatttcttcatagcagtgcaagaacagactaataaagagactgartcctcaacttgtgggatctacactatctccaggtagatagcgctgaaactgaattggaggacacccagcagacatccactgcttggcgtgtggagaaaagcacccacctttgatcacagacatcttctgtattgaagattattgtggkggtgtgagagcagagaaaaaaacaccggtttagagagttttcctgacacaggctcaattggatggagtgtctctcatctcttctgtggtcccatgaacgcatatgcaaagcagtagctttcttttttgggttttttttgttttttttttagtgtgcttccagtcaatttccttattccggaaatttgttagaaacttgtttgatagcaatggtccttaccctctttaattgctataattttatttattttgatattctgatacttgttagcattttattttgaaataatattgaaattacagaaaaagctgtcaaaataggacagagttcctgtacgccaacacgcagtgtaccctaatattaaaaacttacctaatcatagtatagttatcaaaattaacaaagtaatatgtgtacaatgctcttatctaaactacagattttatatggcactgcaaattttccactgatgtcctgtttctgtcccagaatccaatccagcatactgcattgcacttagacatcatgcctcctcaatctcctccaatctgtagcaagtccttaatcttcccttgttttttatggccattacttttgaagaatactggtcacttattttgtcaaatattcctcaatttaaatttgtttactatttcctcattatgagatttgaagttatatgtttttagtaaaaacgccataggactgctttgcctttaatgcatcatatcagggagtattgatgctgatatgtccaatcataggagatgttaactttattcaggtagtgtctgaagttttcttcatttcaaagtttctgttattttcctttttagtaccttggagaagatactttggrattatgcaaatataatgattgacagcaaacttttgtccactaatcttatttattatcattattattgttattactattttttgagacagggtcttgctccgtcacctaggctggagtgcagtggcatgatcataactcattgcagcctcaaactcctaggctcaaacaatcctcctgtctcaatctcccgagtcattggaactacaggcacacaccaccatgtgtggctaatcttttttggagagatggggtctctctgtgttacccagggtggaacccctaggctcaagcaattctcctgccttggcttctcaaagtgctgggattgtagccatgagctgcaatgcctggctccactaattttggtatccatccttgaatcttgcctrcatcagttatttctgccttgttccaatggtaattatatattttcctcaattcttctacatttattagatgatatttttctgtaagaaagagctgttttctctcctttctattcaattattatgtattcactatggacttggtgtttgattgtttggattataatccaatactatcattatttattttgctcatcaaattgtttcagctttggccattgaaagtgctttcatattggttcacatgtcctgttgacatgtccatgtctcttttaaagcatttttttgacttctgtcaccacaagatattccagagtcatgtagtattttccctgatgcagtgctggaatcaaccacttctccaaggatctctgggtccttttattggaaattgatatgagaaagcaagatctgggtattaactctgctccttgtcactgggrtgccattgcttttaggaaatatatactaacccatggatacagtcatctaaatgattcatctattatatattaagaaccatgagttcgtatgtatcttcctatactttcttttcagtgggatattggaaaagatgagaggcaaacatgtattctttgtttgctaactttaatcagaaatcccaatttttcagataaaattttaaatcagtgctttcacagatttgttttaataaaaattacattgtttttcctacttcgtaccctcaaatgcattattcaatctttcagacacgatagatctttttgaatacaaattaatctagactggcataaatagaacagtgaacacttccatggacattcgtaaattcattgccaaaataaagagatctgtggagtctcagtttcattcatttatcagagaggagaacaagagtttaatgctgacaataggaaaataaataatattcagttcaaaattgagcacatctttagaccaagacggtgtttgcaacatagtagacactgaatatatacktgttgaaatgaatgaatgaaccttaccaatgtcaccctccataaccatctgttgctatgtagttcttcaatgtaatggaaaacacacagcatgcattgcagcatgatgcctctgttctcatcatacttcactaattgattcagcaaacagcttccacccagacataattctaggcawgtatatttttaagtgaaaggattctatcaggtgatgtatcctttttctaaatttcccatctttttcttactttttggaatgagttcagatatataggattaggcctataaggtgaaggaatttgaaaacccacaggaaattagaaaasacattgtgtttgtgaattcagaagtgacctacatagcaaatgtgcaatttgcttcagatagaaaccagtagattccgtatattcagagatatgtggcatagagagctatagttcccctgtaagtgggtaagatgtctttattaacaaaatatttgcattcatcatatttaagaaaagggcactataaaggtgaatggggctttttgaccactgattcacggtagcaagattggaaaaataagctgactgttggtattttctgctttttcagttagtttctccaagaagagagagaaaaattcacttgctttttgtggcttctctgtaggcacttatactctgtagatcatctctgtgttttcagtgttctaaaattatgtgggcaatcttgtctcctctcctgtcttcttgtacttcaaaagtatgcacctatatttaatatccatgggtagagagaagcctttatggagaagatagtatgtgaattgtgccttgaaggatggggaaatactggggggaaaatgagggaaggatgaccttctgatagagggaaaagagatggaaaattgattactacgatgcttatgattgcatagacaatctggttcaatcatctacttactgaattttgtagaagcatccattctctaaaggagtacataggattaataaaattaaattgagtatcttgataaagcactcctaattctttggaaaaacttgtttcaatctctaatatcccaacatacaccacaatactatttcactcaggaaaaatagtgaatttattatgtgtgacacttaatgacaaccataatgtaaggtttgtaattactgggatggggaagaatctagtatatctcctgataatgtagctatatttgaaatttttaattgtattgaagaaaaaacataatacaattgtgtatagtaaataaaattaggttttcacttagttttatgatgagccaattcagatttatgtggtttaccagttgttggaaggactactgtggaagtcacttacatgtgtatttatgaacttgaaggatagaatttttatgacagtggattcatttaggaaaaatatttcaatcatttacatttctaggtaagtttcaactaaatatttttattgcataactgcaacaacttcttgtttatgatatgcaataacattttttaaatataaaattcatacgtaatcattgtagaaaatctggaaaacttaccaacataaaaattaaagtaattatgtcattattgaaggataactattttaatatttgttttagttatatctcacaaccacacaagagtgattgtactactttttaaattcattatagtgtgcagtttccccatctcagtaaatagtttttgaaatttgaatttttatgatggcatactggtcttcaagcctatgttaaaaattttataaagcccagttgcattmattagtcattctttctcaaagctagcaatgatgagaaaggggtttcggagccctgaagttgagaagggaagtgttgaagtgtctgactggggccagcaggggttgctgtcatggatgaggctgccacattcctggtgtgtctgactttggactcacttaacattgtagtctggattctattaagggaactttgtgtttctcctttgcaagagtcaccccctaccatgataaatatttaaaaatgtttttttttttttaagttgggaaagcaaacttttcccaaaagaaatttatagttcaaatttacaccaagttctcactaactggagcaagccgggttttcactaaagctttgactttcctctgtaaaacattagtcactcccttggaagaagcagttttttataggcagtgggataaaacagccacagacgtatgtgtaatatgatgggctttagaatgtacctgcaaagcagtttttttttttttttccatttggaggaaaaaagatgaaccaaaaaagactgaattgggatgctaaaataacagcgatttattattaaggaaatgatacgcttttgtcccattcaaataatgtttttattccccttttctttattcttgggaggttcctattgttgtgccaggtcgttttcactgaacgatttttaaaggtattcaccagtcccacgtgtgaccggttgcatttttactgtgcaggaccatcgtgaagcctgtggccaaagagtttgatccagacatggtcttagtatctgctggatttgatgcattggaaggccacacccctcctctaggagggtacaaagtkacggcaaaatgtaagtacctctttcaggactttacgaaaggstctgatatcataccatcttttaggtctttatgatagacaccaccttttacatgtgtccagtaaacttgggtgagacatttgaaaatgattcaggtggtgtttattgctctgtcggattcatgtttctgtagaaatttgcctttaagaaaaacaaagttaaagtgctttgtttggtggacatgacagcacatttcagaaatcgtatgcttttcaggagacctgttttacatttaaaggcagaaatgatagggcttctgtttaaaatrtgctgcatgacttgagaggtcatgagtctagaaaagctactgtgcttttccagggagaatggaagttccattgtacatgggataaaaataactatttcttaataatattatgcacttccaagtttgaaaacaaaagtgtaattccccttgctcagagcctctgtatgtgtctatgggcaaccctcataatctctactcgtcttctgttgtgttgcaaagttggactttttggctgtgttccttagcaactggacaccacatgaagaaataaattttatgttacagtgcatttgartaatacaacctaatggaatctggctagaaagaggatttctttaaaaataattcccttgctctctgagtgggaaaaaaggtatatatatatagctcacatataaatgtacattggcaccaggggtatctatttaaaaatagaagaaaaaagtaaaattacacaaagaatagggcccacagtggtgtattttagggagcattgcaaagcagacaacaacaaaaaacccaaatacttttaagtgggagagatgagtttggagcaaatgtgctgtattaatttaaaaagaatcaaagaaatagcgtcatgccaacctttgtttttagctggcttctcatgtgaaagagttttctgcactctaattgttctagtaacattgttaggtagtaactatttttaacatgtattatttacccaggattctttgtgccttgttgtctattaaaaacatattaaaacaggaaactctacaaagacaaacaaagcaaaataattcatgattttggtaaaattgaatagagaggtgtttgctgagattaaatgtctgtatggcctttttaaaaaattgttattattatccatggaactcaactcaatggaagtcagtctttccatcrcagataaacctcacttgtgggtcagaactggtaaacagttgtctaaataaacaaagacaaagagagtttgtacatcaagttgagataaacccaaaaaaatacaaaatacctagcgaagaaagaaggaactctsgaaaagttgttccttgccattaaatccaagaatctcactcagaagagaggagtgtctatgtttagtctttctccttgccacagggaaaggttgtaacaagactcttygtcagaactagttaaagggattgatcattttgttmccttgtgtcttcatttttggccaagtcaagttcaaatctcaaatgttaccttgaaaatagtcgcatggtttcttttggccattaggtataggagacgtgggttctaccacttctaggtttagtagagtataatagcatcttcaatatattctttacccatttacatatatctrttcattggagaggaagctcttcattgtgttccatctcagaatcagtttgtctagaatgcctccaactcccctcccctcgttcccagtccctccataccccttgtgtatctttcctactcaagaaccatatgttctctgctaggtgcctatttcctaggaaaatcaagcagacatattttaagtgatatcatactttaccttttgcgtatttgcagtttaataaggaaaaatatatacaatgagaagagaagtccttagagtctaaacagattgtagttgaaactcttcacatakcttatagatgaggaaactaatttattttaaaatctgaaataactggggttaaaatcaaagttcttatcctgaatcagtagttaggtgaaattgcatgaggcattttctgtattttttccattaaaaagaaaatgtttcataaaatggatgagaatagattttttttttttttttaagacagagtttcactcttgttgtccaggctggagcacagtgggatgatctcggctcactacaacctctgcctcccgggtttaagcagttcccctccctcagcctccctagtagctgggattacaggcatgtgccaccatgcctggctcattttgtatttttagtagagacagggtttcatcatgttggtcaggctggtctcgaactcctgacctcaggtgatgcacctgccttggcctcccaaagtgctgggattacargcatgagccaccacacccagttgagaatagagaatttcgatgcacactacagagaacatattagtgcccatgacccttaatcccccaaacttagtctatgacagacattgactagttttgtgatacttaagtgaaacacaacaaagcctcacatctgggcaactgtatatattatttcatggaagcctgagtttctcagctatactttctagagatgctgccccaacaagtgggtagaagctgggattactagatagctcaatagttgttccctaaaacactccccacttggtatctttgtttgctttctaaccacctggcagatgcattcatattgctttggtcgaaaagttctgtacaggcaattaacactggactttcactgtcttgttcaggaagtcatcctttattgtgggagtagggtgatcccaaaacgaagttagaaatgggctagattctaaagtaaaaagtaggaacaagatacacaaccaagttcttctccccgtgttttccaattctagcaaaactcattcctgctccaagtagaatatttgataattacagagagtggttttgaggatgctatccatgtcagagatgctaaaattatattttcttagcacattgagtcaatcttttaaaatagttttgtttgctatctctgaaaggaaaagagaaatgaagtcaaaataactagggtttttgtttgtttttaaacattgttacctgattgaaaaataataataaaaggttggtgtaatcaccaatatctcagcccaaatatagaggtgatttaaaattaaaggtaattcttttcactagtgatgtttttctttcttcctcttttctcctctcctttctttatatattaagtgttttctgttatgaaactacaaracttttggcattggtttctgctgaagttttaatcaacaatctgaattacttacttagtatcagtgctgctctttaaggaccaaggctaaatcccaaccygaaatgactaaatagctttttaacctgccctaaacccagcatcaaactgtaccttgaagttatcagtttatctttctaaatatgctgattcagatatagttgtcttcaggttacagcttaatcaggttgccatgacaactaagtgctgtattcaaacaataaaattaattcatcatatactaccaccccctggctttatagtgttgttaacatttttttttaaaaaaaagcttctttggtttaaattcgttttgccacaacatatattttttcttccctttcaacacatayatgcgttcactgcttttgttggtgtcaggcagtgaattcatatattcaaattgcttttgtcatgtgaacaagaatatgtttttcctttggaattatgcaaaatcattgtgagatgatagccatatctgataaaaagtatgttccttttataaacatgtgaaatacattcctttaataaacattttatagtccttgagacagaaaccatttctctcagcaaatatacaagggttattttgacaagtaaatcaataaatgtgattcatcacataaacagagctaaagacaaaaaacacatgagtatctcaatagacatagaaaaggctttcgataaaattcaacgccccttcttgataacaactctaaataaactaggtattgaaggaacatatctcaaaataataagacccatctatgccaaacccacagccaacattatactgaatgggcaaargttggaagcattccccttgaaaactggcataagacaaagatgccttctctctaccactcctattcaacacactttagaaatcctagccagagcaatcaggcaagagaaggaaataaagggcatccaaataggaagagaggaagtcaaactccctgkttgcagacaacatgattctatagttagaaaaccccacagtcttggcccaaaagctccttyggctgacaaacaacttcatcaaagtttcaagatgcaaaattaatgcacaaaagtcagtagcattcctacacaccaacaacagttaagcctagagccaaatgagaaaggcaatcccattcacaactgtcacagaaagaataaaacacctaggaatacaactaatcagggaggtgaaacatctctacaatgagaattacaaaactctgctcaaagaaatcagaggaaacataaacaaatggaaaatcatcccgtggtcatagacaggaagaatcaatataattaaaatggccgcactgcccaaagcaatttacagattcaatgctatttctatcaaactaccaatgacattcttcacagaactagaagaaaactattttaaaatccatatgaaaccaaaaaaagagcccaaatagctaaggcaatcctaagcgaaaagagcatagctggaggcatcatgttacccaacttcaaactatacttcmaggctacagtagccaaaacagcatggtactggtacaaaaacaggcacatagactaatggaacagaatagagaacccagaaataaggccacacacctatgactaactgatctttgacaaaactgccagaaacaagcaatggggagaagactccctattcaataaatggtactgagataactcgctagccacatgcagaagactgaagctggaccccttccttacaccatacacaaaaatcaactcgagatggattaaagacttaaatataaaacccaaaactataaaaaccctagaagacatcctaggcaataccgtcctggacataggtattggtaaagattttatgacaaagacacaaaagcaatcccaacaaaagcaaaaattgacaagtgagatcttattaagctaaatagcctctgcacagcaaaagaaactatgaacagggttaacagacagcctacagcatgggagtaaatttttgcaaactatgcatctgacaaaggtctaatattcagcatytataaggaacttaaacaaatttacaagagaaaaacaaccccattaaaacgtggggaaaggacatgaacagacatttttcaaaagaagacatatatgcagccaacaagcatatgaaaaaaggctcartatcactgatcattagagaaatgcgatcaaagccacaatgagataccatctcacacaggtcagaatggctattaagaaaaagtcaaaaaataacaggtgctggcaaggttgcggagaaaaaggaacacttagacactgttggtgggaatgtaaattagttcagccattgtggaaagcagtgtggcaattcctcaaagagctaaaagtacaaccaccatttgatccagcaatcccattactgggcatatacccagaggaatataaatcatttgaccataaagacacatgctcgcaaatgttcactgcagcactattcacaatagcagtgacctggaatcaacttaagtgcccatcaatgattgactgaacaaagaaaatgtggtacatatacaccatactatgcagccataaaaaagaacaagctcatgtcttttgtggaatcatggatggagctggaggctattatcctcagcaaactaatgccagaatgtaaaaccaaatactgtgtgttctcactttcaactgggagctaaatgatgaacttctgaacacagagaaggaaatamcagatactggggtctacttgagagaggagggtggaaggaggaagaagaacttaaaagataactattgggcttaattcctaagtgatgaaataatctgtacaataaaaacctgtgacatgaatttacctatgtaacaaaccttcacatgtacccccaaatgtaaaagttaaaaaaaaaattaagtgatttaaaaaagaatagttaatagttgccggggggggggaaccaaataacaaagcttagcrtcttgaattaccatcttttttttwaacagaaaattgtatttcttttcagtatcttctgattctctttcccccaccgagtgcctgtttagcaatgagaaagcataatttgggggaagatacctgtataaatgaatttagacttaacagtgagttattcttagggaagtacaaagattccttgtttagtcagtcaatgatccaaaagtaagactctaaaaacttgagtactaatccgataaacaaatgccaagaaacaaactgataaatacacaaggccatgttgtctacgtcttctgctaacaatgcgtgtacatgctttatcccaagtgcctcatgaagttttatctaactacaagttctgaataagcacttcagttttaactccagttattacagaggataagataaattagtttcctcatctatgagacatataaacttttttagatagccttgattacaatctgtttggattctaaggtcctctcttctcaatggatatttattctttatcaaggtgcagatactcaataaaaggtcatatatgggtatgtagctcaaataccctccacttttccatttcttgtgtccacagagttgaatatagattgagccagaactargtgtgttttggtgaagttgactgctttttttcttgttcttttttactaatgactttttactaatgactctatacctatcttaaaatgtccatggctctcctaagtgtctaattttttccacattatcaaaatctataaagaacctaatcatatttacttaaatgcttcactaattacctgactatggtctttaaatgtaagtgtatttcacctaatgttatggttgtaatatttctgtaactattcagaacgtagtagctctgtttagcagttgtatcttttattacttatctgtaatcagggactcaatgccttgtcttctcataatggcatttcaggccacagcaaacatgtatggagaaaaggagtgtctagaagtcacctacccaccaggtaccacttcatgaagggtcaaccttaaacttgaagggcttcagttcttttagattagggtgaacacaggggaatactatgcagcattaattcttcraagtattgtcttatccagctaccatcagattaacctctttcatctgcttctgtgccgtgtttcaaaaactggccaagtgcctggaacatagtctaaatagcatttttaaaaaygagtaaggctaaaaagaatccatgatttttttaaagtaagtcagatgatttcttccactatattcgatgtttcttgaaataggagttcataattttttttcttttttgccattgctatcttccccatcactgccatttcttagttttgaatcacatattcctgtgttctataatattttaattaacaaaaccttgtttttctgaaaactgcttctgacaatggacacttgtttaatatttccctttaataggaattgtattcagggaagtcatggtctccttgtaacagtgggccttgggcaaaagtgcggagacccagctgttaacacctgcttgaatctaattggtgagaaactcatttaatctctgctcagaaaaccaggacatgggagatgatagggtcctttaattattaaactggaaataaacagtaagaattaaaggagagtaaacaatagctaattttggtattggaaaatatttgttcrgatctcaaatatgtttctcactaattttgtaatcaagttagtttcctaatcagccaaaaaaaaaaaaagtgggtggggaagggagataataattttacctacaacctatgtaataaatgattaggttgtgaattaatagttttgaattttattgttcatatcatttcaacaattctaaatattcagtgaaagtctgggtgtttagatgatatatttgagcacaaaatatacaacacaaattctgtagcttttttgaaggtgtttcagactcctgtttgaagaaaatggaaggaggatgggcagacatctttggaagcaatgcaggattttaggtaaatagtaagtgtattgtccatttaattaaaagycagtttagcaaaataagtgcctgcatttcacatttctatatctgtttgtattcctactttataataaatccagagacaattgaaaaagtggtaatgtttttaaaagaaaataaagcattattattttgtgatgaggatacctcagtcattgcttgcctaaaaactgtgcattttgttatgatacattgaggtatgttctgctcttaacattatgaatatgccaatgcagaataaatagtccagtgatgcttttttagcaattgactacaattttagttaactgacagttaactatctgaaacacacttgagagtcagaaaaaaacgtctcaacaaaatactaccaaatcaaattcaaaaacacattaaaaggttcattcaccatgatcaagtgggatttatctatgggatgcaaagatgattcaacataggcaaatccacaaatgtgttatacctgattaacagtatgaaggacaaaaactatatgatcacttcaatagatgcagaaaaggcatttgacaaattcaatgtccttttataataaaaactcccaacaaattaggtatggaaggaatgtacctcaacaaaataaaagccatatatgataaggctataaatacatcatactcaatggtgaaaaaataaaagtttttttcctaaggtcaggaacaagataaggatgctcactctcgccacttctattcagcatactaacagaagttctatccagagaaattagacaagaaaaagaaatgaagggcatccaaattggaaagggagaagttaaactgtctctgtttccaaatgacatgattttatatattgaaaatccaaaaggttccagcaaaaaaaacctgataaaaccaataattaaatacagtaaacttgcagaatataatattaacatacaaaaatcaatagcatttctgtatactaacaatgacctatctgaaaaatgatgaagaaaataatcccatgtacaatagctacaaaagggaaaaaatgcaaaaaccttaggaatacatttaaccaaggaggtgaaagatctccaaactgaaaactataaaatgttgatgaaaaatattgaagaagatgtaagtaaatggagagatatcccctgttcctaaattggaagaatgaacattgttaaagtttacatagtgcccaaagctatcttcagattcaattcaatctctgtcaaattcccaatgacatttttcacagaaatagcagaatcaacccaaaaatttgtgtggaaccacaaaagaccctgaatagcctaagcaatcytgatcaaaaaacacaaagctggaggtaccatactttccartgttaacagctactgtgaaactgtagcaatcataaaagcatgacagtggcataaaaacagacacatagaccaatggaacagaatagaggacccagaaataaatccatacaccatggtcaattgatctttgacaacgatggcgagaacactccatgaggaaaagacagtctttgataattggtgctgggaaaactagatatccaaatgcagaggaatgaaattagaccctcgtcttataccatgtaaaaaaaatcaactcaaaatggagcaaagatttatgtgtaagacctgaaattgtaacattaatagaagaaaacatagaaaagatttatggctatagttactattataaacaatgttgaagtgaacatccttttamaagtctccctctgcatgtgtgttaaagttaccttaggctgatgtttttagtcagttggggcttctgtttcttctttagtatgtagcacttgaaaacatgaagggaggcaggaaaataaggaaagaatgycttcgaccttccttacctattcctcaaacttcagtccacatccctgtttctcaatacacatgcacacacccacacaacaaatctctcctcctctctttactgtttaatactctgtatatcacacctcttcggttccagttaaaactggcagaaagggtggttctgtrtactgatattcttcaagtttaatccaaactttaggggaaaagcaggtcaaaagtcatgcagtagatatgtaaaataccattttgaggtgttttcaagcaatacgttgggaaytacaatttaaatagaaaagatgactttctgctcgaaacattctgcttaagttatcaaggactgyggagggcaatgtggtcgtaagggtgaaagcacagcctggtcgtccagcagaaaacatcataattctggcctgggccatcagaattatcccaggaatgccacccaacctcttgaagattatattcttgactgaaaagggaacattaatttcatcctggctgtgttgttgttattgatgatagaattataatacctgccagtgatgttgaacgttttccatgcactaggcactatgcctcaatgcttctctgcactatcttattttgtttttatgattaaatgagataatatatacatagtacctttgtgtattttttgtattaatatcattttttaagatgttctcatccctctgaaaccattacaaaattttacaaccgtttatatttctaattttaaaagtaacagaaaaattaagtaactatgcttaagtcacagagatgaagactaacaaaaccacaaccagatctcatgtctctagacttccgccttcatttattttcactaggtttaatgggttattaaaaatatctcaaataaatatgtacgcactttttaattactatagaagcttctctgaattgtgaaaatatttttcgaaaagaaaatttttccaacaatgacttttttgtgtaaataaaattttccaggtcagaaaagtaagctttataatataatagcagtttacagaccatgtttcctatttctcatggagcatttttcacaagaacgaatcaaggacttactctttgactcaaaattcctgcaaaccagtatgtctctttgttatattctcaagcaagtacatggcttcctgcaaggacagaggaagggaatatgcaagacatttatgattgcatgtaatagagttcactcatatatatttaacagctaacaaaaaaagcaacatggctgattaagaaggcaaacctgtcaggatataaaaacacaaatttgagaatgattttatttttaaattacaatcaaaagatttattcaagtgaatgagtgctccatgttcgctcttactctgcattcacttccttgctcaaytgcctatttcctcataccacatgataactcagataccaaattgtagaagaatattttccacctgcactgtttagttactgatgtcatgaaacaatccttaggctaggatgactgctgcttaactttgaagaacacagttactataactgtaccataacaggccatttcaacattgcttatgaaaagaaaatatgtaagcagagtttgccccagaggaagatgccaactgcagctaatgtgtactgtattccattaatactaagatatactttttcatattttgacatatstgaaattggaatgtctctcacacttgatggtgtttcatcatgagattgaggctgtttttttaattttcatagtggtatataaaataatggttacatttattttgtgccacaattgatggcatcttagattcaatggaaaataatattttactctttgagatgtttgtaaaatcccagccaatggccttcctaatctaatagcttagatttctattttatattttctttacagacttccagtgactgaatagaatcccaaagaagcaaaaattaaaataacaaaatgaacaaaaaatattgccagggacaaattttaaataatagttgattctcttactgtgagtttgctttgagctcagacaaaaaatggttcttccttggcctgacatctccataaccgtagattttgaccctttattatgatgattgctataagtaaaataattggcttatgattcatcttacaaatcaaatcaatayggaaaagaatcagttggtcaaatcctttgttaagtaatgtcatggcctggtgccagcagtgttaagtgtatggaatagcatgtgaccaagaatcagctattaatacgtgtgtggctgatgaagtaatcaaggaaatcttggggaatggacgtgcagcttccctctataggaagttctcctcacactactgtcatgggctggagagtcactatggactactacagaggtttccaaattaacaagcatcagtatcacctggaggccctgttaggcatgctgggttccgcttccagaatttctgacttagtaggtctggagagggtactgcaattggcatttccaacaagctctcaggtgatgctgatactcctgatctagggaccaggctttgagaaccactgggctagtgattgaaaaaaaggaaacaggatttggaattggttgatctgcagtttgggtctaattggctaccaactaacttctttttttgtgtcttgatgttctttttattcctaacagaaatagtacaaatcacgtgtgctttggctaaatatagggccattatgagaatcaaatgaggtaatggacctaaataaaatgctttgcaaaatgtgacactctacatataataacgtataaatgatatcatccccacgaaatctactattgttttcacacatataagctggggtcagaattcatatgtcaaaatacatttgcaatcttatgtgaaaattaatactaagctatttagttatttttaaatgtttaacataattattttatatttctaaaaacatttgaaatatttagttatttttgttggtttttataggaagtggctaggattccacatatattttcttcctctacctaatccctttccaactgaacctctagacttgtcccatgcaacgccaagatttgtggccacagagaagtcatcaggagttgcagtggttctcatgccaacagctcttagaattcctcagaatgatagaaatttagccacctttacccaatatttctcccacgtagtttcagaccaagagtaacttttatgaactccctcatttatcttatcccaagtcacctaactgttacttggtaaagcgccataaattcttcctgatctgtcagtattaatagaaagagctctatrgaaatgagctttcactgggccgggygcggtggctcccgcctgtaatcccagcactttgggaggccgaggcaggcggatcacgaggtgaggagatcgagaccatcctggctaacacggtgaaaccccgtctctactaaaaataaaaaaataaaattagccaggcgtggtggcgggcgcctgtagtcccagctactcgggagsctgaggcaggaaaatggcgtgaacccgggaggcggagcttgcagtgagccgagagcgtgtcactgcactccagcctgggcgacagagcgagactccgtctcaaaaaataaaataaaataagaaatgagctttcactggctctcaggatttgatacgttttcaataaacaataggaaaagtgacataatagagatgtattaattttcctccaagttgtttttaaaatgcaaaacttgtcttagaagtgtctatatcctatcgacctcccaccttaacactatccccagatcttagtatcagcttcttccatgagaaattgtgtggatctagccagattaaaactattatttctctcctcctatcatctctttacatggttaatgtaactttttagtctaaatgagccacctgtgtaaaatacatatttattttaatgatagaagtgaaaaagaaatgcctagggttataaatatgaattttgtaaatactggctttgattgctgcatgcttgtgtaatgttcaaccctttttcaggaacgactttgtctagtcatatataacaatagagtctatagataaggtctttattccatgctgttttcctcttttctctgccttggtgaaatttgtctataagctacakaaattacctatttcagaaattattttaccaaacaattgactatctgtggcgtatcattcctctgctttatattcttttcctgcaactacaataatgtacacctcttaccacacgtgatgtctatgtactctctaccctactctatgctcctctgccaacccttttttcactattytgcagcctggaaaatctttctgtctctctaacagaccaggctcacatcagggtctttgcatgaaaagatcctattcaaaggatctcttctttagtgataacctggttatcttctcagctcagatatcaccttctcaggtcaattttcctgaccagtgtacccatcctccatcatgctctatcacttctttgacgttactgtgtgttgttaactactatgtgtccccaggggctaaaatatcacctcagctattgtctaggctccagaaatatttattgactttcatgtatggagtgayttaaaaaaaaatgatctatttaaaaatatatttaaagtcaatctctttattttttcttttacttgaaaagtttgctgcatgggtgtttattcaagatattttcataataagcatccatgttgtattgtgcttgttgctataaaaaaaagaaaaggaaacaatgatcagcctgccagaccagtacttggcagtggttcaaaaagcaggctccacagtatatacacctttataggaccaacacatgggtctgccacttttcttctttgttttgtcgttgagatagtgtcttgctctgtcacccaggctgaagtgcagtggtgcaattatggttcattgcagcctttagctcctgggctcaagtgatcctcccacctcagccttctacatagctagcactaccggcctgtgataccatgcccaactcattttcctgtaaaaaattttttgtagaggtaggatcttgttatgttgcccaggctggtcttgaactcctgtgctcaagtgagcctcttagccttccaaagtgttgggattacaggcgtgagccaccgccactggccactgccacttttctaattgcgtgaccttgggcaacttactttcccttttagtgggccttaatttcctcatatgcaaataggactatatctcatagatttatgaagagtaaatacagaaactcatttaaacatctcagcctaaagcctgacatttagcaagcactcaacaaatgttagccaatattagatagtcttatcatgtccatgtgcctcaaaagagctctggattataacatctttaatgcctgcatagcaactcttaatgcatgacagttgaacagttctagatctgtgttttgataacagcatataactatctgacttttaaatgcttcaaaccacctaacagatgaaaactgctgtaatgagcaaccaccaaaagtctacaatacaygagtcatagagttttggagatttgttttggagagttttggagatctgcccataggatgactctcccagacatctatgtaacaaggagtcagttttgatagccaagcacacgtaratagtacaggtttaataatatttgggacatttagcaaacttcttcatttagtaagcatttccataaacatttcaaagattttyatatgtgggaaagaagagtttatgctgctcaagataaatacaaagaatgaaacagagggaacgtttctgttgatgattggaattataccacatccattgtggtcgattaccttttgaaaagcagattttttaaactaaaaaggaaattcactacagtgtaacatagaagtattaatatttactttggggctrtaacatagaaacttatctttgatggcaccgtaatataaactttaagcgaaagtagaaaatagatgaaaggataggtggagctagtgatgaaaagacaaaggtaagcccagagagaccaggcaattagaccaaggtagtgtactcaggatttaatttatttagctgacctgtactgacctccagcagtctaggatattttggcgagtctgtctgatctgggtttcatagcacgtatttgtgcgctatataaaatccagctgtctcatttagaattgcttatctcagattcagaatgagctgccagctctgttcatttgtttgcacttttctggatctactataaacagttttctcagatgttgttactctttagtcaaagatttctccccacagcactttccttatgcacaatatttccttcctgccttagggtaatcatgtaaataaagtgagtccctaaaaccactttgtcgcccaagtagccagcagagggaatcatttatgaaatgtagttaatttcagtaactgacaagcacatgaagtgcctaaagaaaacaggagtgtcaggctacttgggatggttccaggaaggtcctctactttaagagctgcattttactaaggatcctgatggttattagaacttttcctgttgttttactcagtagtctccaggggactatttggcacttgggtgcaaaatgagatcagcaattaggaagaaccactgcaggcacttgaacagtaaatcattgagtaccaggcttaagagctagtaagtaccaggccaaagtaatagcctaaggatggtggtaagtctggcttcttagtctttccagggtgcttggggccctagctccttgtgtgactgacttgaggtggtgttcagatatttagcartgggaaagttgtaatcaactttcaatcccaatagatcaccaaaggtttggaagtttcatcaacttggaacctgaaaagtctacactattcacatctatttaagggcagccctagamccaccttccacataggacacataggacagagatactagtgtcaaacagcctggcaggtctttgtatgaatggattcatyccctctgggggtgatctatttgattagatccagcttatctatttgatgacacccatgtaggtaaaaaataaaaataaaaaataaatcttggagagtaaaataagtaattttttacttgcaaccaaaggcacaattaccacttatttccaagctctgattacttcatttactcccatgtaacaatcaagaaaagaatgaaaaagaatgaggggaaatagtgagctttcaaggagtttattggaagaaacacaaactaggaaataggagacctgcgttctacagacacgaagtatctatttgaagaattgatgtcttcagtcgtcatctggaaaatgaagtatttggaccaactcatacaatggtttaaaattctctatgtagaatatcaagagctacgaacatttaaaacgtgtttataatcaatagtaagcacattgcatttactacttaatctttataacaatgctataagataaacaatatcaacatgatcctcattttatagatgaagaaactaaagcataaaaaagataagaaagggtcaaatttatgaaagagctagagatggaattcacaggtggtctggcatcagagctagtggaatatactttctgtctacatttatatcagaaattgaccttcaaaacaaagagaggcagtstctctccctctctgtccttaccgctattctttcttctctcctggaaggtcatattgtttatggagagcataactcttccactgtaaggtcttgagccctgccctgcaaagacggaaagaggtaaatttggttcctcgtgtatctattctcttatgatgctttattaaaggataatttttaagaagcaatacaaagtgggaaaaggagaattattgcccagaaataaattctgaaggctcaggaaggtatatttgtttttgtcccagacataaaatgcaattaaatctaccccatgtaagactgatgaaacttctttcttgatagagagatgtgatttatattctagcawtaattaatactgagtttaaggaacttaagtttatgtcagatcatttttttttcctcccaggttgttacttgttgcttctcatatttggccttccttctgcagctgtgttgagagcttatacagtgtttcaagtaggtaataggccgaaaaaaaaaaaaaaaaaraaaagaaaagaaaagaaccctaagtgcttttgtcattacagcagtgagaagaacagacatgcaaacaccttcatatctagagctctctcactgtacccctaacgttcttttcatattgatggtgacagtagtgtcaaaaagcagagagaaagctgtaaaccgtaagctacagggagatctgcaaaaccaagttactcagggtcacaacctgtagttgtgtagtttgtgctttacacaaggggcagcagcgtgaaggaacataacataaccttcgctctccttatcaaccaaataccatggcctggggcaatattcaaccagagaaataaaaccagaaagaaaagaaagtgactaattcaattcacaggtatacatcaggcatctagtgctggagctacatcagtctgaagaagtcaaaactccctgtttgcatgtgrcttatatttaaactgtgctgtctaaaatggtactccctggccatatggttatttaaatttaacttaatgaaactatgtatttcaactgcccaatagccattcacagctagcagcttccacaatggacattgcagatatagaacatttgcatcgtcactgaaagttcttttggggagcattgtctagtggttaaagcytaagcaaaataagtaagcaaacatagagtacattaggagttcatgaataaaatgaacgcagggaaagggtcagattttgctgggacaagggaggtttgtgatttttaaaagggtgatcagaaatggcctcacttataaatgatgtttgcctgaagagctgaaggtgataaaggagcaagctgtgaaactatcatagggaggaacattgtaggtatggggaacagaaagggcaatagccctgaggcaggaccaagcccacagtgccaaaggaagaagaaggcaagtatgagatgttcaagagaaaagggtgatagaagtggggaaaagtagtcatagtttgatttattttaaaggtgagtgaactggatttgctggcaggctggattgggtatgagagaagatcagaaggtgggaatggagtaaaggatgacttcagggttttgggtctgggcaccagagaggaatgagtggctctgaactgaaatggggaaagatgtggaaaaaggtttaagctgagagttaaatttagttgttatcagcatatagacgctatttaaagccgtaagcccagatgagatcacctagggaacaagtgtaggtagaaaagagatgcaaagactgttgcttgggacactctaacattatgacattggagccatgagggggagccatatgaagcctgattgattttcactggcagagtgtgctgtcctgtagcccaatggaggcaagccgttcaaagaggagcacaagccattagctctatcaaatgtccttaaagggtcaagtaagataaaaactgaccactagattcagtaacatgcaggccacttctgacctagacaagataaggagtttgatgagttaaaagcctgattagaggagaaattggaggagagaaattgtagactgcacatatagactgctgctcttgaggaattttattctaacggggaagagatcaatggagcagtaggtagagggaggaaagggtctgatgagtacttgaaaaaataatcttaataaaatgacagcatatttatgtgatgctggtcatcttctagtagagagggaaaattgatgctgctgtaaaaagaagagagaattgctatacaaatgttcttgaatttgtgaaagaattgagttctaggacacaggtagaaggcttggtcttagatacaggagaatttatccacaggagcagttgaaaaagcagagtatgtgggtccagatgctggcaggtgatgggtgtaatggtgggagatatatgaagtgtgcttctgacttttttctcagtgaaacaggaacaaaggtaatcactgagaattcgaatgggcaagaacattttggaggcttgaaaacatgagagaaggtatggcataattatctacaggagtgaaaaaggggatctactagcggaaaatagcttagaacaacttatgagcccatgtaaatttcacatataactttaaagtgagaccagtcagaataactatgtcaaataacaataccatttcaccagccatattcgatagggctcaggccccgctaggcagagagctggatgtaaccaggattgagttagagtaaaagagacaagtgattatctgatgtactaaggattttaaactggtttaaaaggaaagtgagacaatgtagattataagagaaatgaaaaattggtaggatcaatggattgtagatcctagaaatactgcagtgtggcagtaaagagagtaaattgaaaagctagaaggtgataataagagaggaggatgcttggaattgatagtatgaaagagttctgatttttgttaatcaaaaggacgagagcatgattacaaaagtgagtcactaaatcctattctaaagatcagctcatgaagtgagtcactttaaattcttattaggtgagtgtactcctcctttgaatatgagtgttatctttttatgaaagaagaaagttttgacttgatactttcagttaatgctgagatttaaamataaaaaacagcagggcagcatgtttcccttagcatcgaacagctctctttggctgtctattctcttgtaaggttagacagttggagttcgcatttgatctgaggctttaagcttcttgttatactcaatttccaagagtttcctgtttagagwcttgaaatgcagcttagtaacaataagtcattatttaatcatgattaaccactttttaaatggacatatttccaaaagggagaggtagcagtttcttaggtgtggattttgtattccttgactatacaagcataaagaaaacatttgtttatttggataatcaagaaaatctcaaaaaggagcagctgcagttttcattaatgccgaagggaaacatcaagaagatacttttcctaatgtacattaaattccaagtgttatttatgaaagaagaaactattttatgaaatatgatctgttgatgtttaaatgtaaattttattttccattagagtcttatttatgtttcaaaaatggacaaatatttatatttatgcttaagataaaaatatagaaatatttctgcttactaatttgaagatttattagcatttgatcataaaaacatagaaaagagactaatcactttaagagccaagaaaaatatgtatattttttccaactttacagtaacttttaagaaacactcaatttggtcaggcaggattcattcaccattacctttaaaagcacaaggtagaaacttatcttcattaagtgccactgaatgtctggcaccacataactaaccagagaattcagtagcttagggtctatggaatgcctcaagttcaaaggaagagagacatcctgtttggtgttgtatttcacttatgctgttaaaactgcccagaccccattaagtgttttctttttcattcttgggcatgatcttctttgtccctcatgaataacacaaagcttaataaaactccatgccagactaaataattttaacaatgtgttataagattttatttttaggtataaaggtctttctttttgtgcaaaagccattttgttaaagatagtgacatcgggtcacacgccactcctgtggacctggcttgttagagaactagcaagaacattgtctcagacccaattccttcacactgcaaattccactgttgaaacttttactacaatgggtatctatggagaaatagtgaaggtaaataaactctaaattttccactgaggaaaattcattctcaattcctgagaccataaacatgaacacagaaaaataaggtgttttgaactacttctgcatacaatgacattgtaaaggatttagcaatatgtattcattaagtctagagtatgcatatgctcattttttctagtttaaaaccacaacctatatcttccttgaatttcctgaatataataaattttaaaaatagaaaaaaaatttaattaaatttggggaaaataatggctgaaaaaatctggtctgactgaatttttcagaaatagctttactgacatttttctacataattatttgtaacagagtgtggttaagaaatgtgtacatctgatttaaagatgacttttgaagaaaaggtaataaagcctttcaaatgatcgcttattgaataattctcgaaaatctaaacaaagacttggaagaatttatgatttgtcaaaactctaggactttataactttttcctttgttttcttagaatatagctataagataataaataaaaataatgtgactcctaaaatgcagtgttacaatttactaaaaattgtttaaagaatgctatgcggaggtttctgatccttcctgtttgctctgctacctttttctgcagaatatctaataatcatatttgtaggtcatatcaattcaaccatgttttactggagaagatcttgctaaactgcttgatttggcaacctaaaagggtgaataatgggctataattctctacataatattttaagaattggagtctacttaaagattttatttgctactcattatatgtgtagaatgagtataatgaagttttaaaagtggttataaarcaaatgttatgttttctctatctaattgctcttttaaaatatggttacttaaaaaaaaaaaaaaaratccctccatttcagctaagggtctttgccaccagggaaccatgcatggatccaatgcttttaaatatcgtgtccatgtgtgatctttctagacacagttttttactgtcacttttaaaatgttccctataagtcaatctcttcaggaacaaatacatttttgtatatgcatgaatagtaaaatatatttcacacatttctttaatcatctcctctggaccataaagtcatacatggcaactgaccttgtaaagcaccattttagacatttcttggtggaattatttcttaatgattgaatcattcattgatttatttgttttgttttaaaacatttattgagtttttaacattggggaagcattcatagtctattaagacagacacatacacaattatgacaatatatttgtaaaataatattctatgggaacatagatgaagaagtacatcagattacctggttgagtaaagacctcactgacaaggtaacttgtatatggcataaaaagatgagtggtacacagccaaatggaacaaatagctaaaaattttttacataaatattttaaaaattctaaaagcatgttatattttcagaaaaataatgagtggcctcatgttaatagtgtttgaggtatgtgaaggagagtaattaagagaacatattatttctgaaggcgtttcctttgaccacaaaatactgtgagttttataaagaaatattgagagaggcagtatctcattttatctaagttacaaactcagagaaagggtatgtactcagagaaagggtgtttactgtatatatatctacttacttatctatccattgatcatcagtctgcttatgttggaattcacatttacaacatttgaatggaaaaaaaggataagactttttttttataagtgagtctgatttagttgattggtgtgacaaggaagactggtattgtctatctgattgcatagtggacattttccataaattgaatcagctaaatccagaggtccaatattttgaggaaatgtttttaaatcacttacacaatatgcttaaaagtatatcctttaagaaatactaactcataaaaatattagacatccccttaaaagacgaaagaaggtatatagtttttcaaattctgttacgcttatgctaccaaaaagtatgaagattgctgagttaggaagttattgcatagggaaagtttccaaagtatggcttaggttttggaatctccactaagcaaactgttattaatgaaaaaacatgttttaatgttaggatatatttgctatggtttggctgattgaaaacataacttttggatgacagctagactgtcgtccctattaataaaaatgctgtttgggtgtcttgtcaatagaggacacttttcttgtagtgcttagatttgaagtgagctcctatgtggtaactagtaattagtaggactgagtttactcacctgatgtactggtataatttttttttyccctgaaagttacttgctctccctatagccaaacatgaacttgatgtcttcttttttattatcttttctgagattgatgaagaatctgacaacctaggctagatcatgttaaagatgttgacatgatggaagactgtcgattgccaatagtaagtttcaactatgtaacaattaaatagatcgtacttcaaaaattttatagattcagaatctacagattttaatcatttggtttagtccagttaaaattaatagtatattaattatttctttggaagacatggtggttagcttaccttataaataatgtgaatacagtgagttaatgatacagtctttaaaaatctataagccttgaactattcaatgtaatttgttatttaacaaattatcagtgtaatttgttatataactagggttatatagccctagtagtatggataaagatggatatccacactaatcacatctaacttttaacaagcttcatactatctgtgacctgtaatataaaaaaattatcttcagtgtggaaatactatcagaaaaattcaaatttctattctcacaaattgataatgtgcattttctgaaataaagtgttgtttgaaagacttgataatacacacacagaaagatgatagatttctctgtacatggatttcaaacaaggagtttctctaatttaaaaaaaaatgaactggtcacacgatatattcaaaacaaaacaaagacttctatcagcataacattccagaggtttttttccctgtccaaaagatgtatgaatacatacaagaattttgctttaattgtgatactcttaatttcaagtctacaaaaacaactcaaatctatacatgcgcacacaggtgcacacacactaatgcacctatgcatactatcattatttaraaatcaaagataaataaatttaaaatatgtctcattaggactgggaaaastctagggtgcttcttcatgctttctaagcatgaaatgtacttgatcctgggatgctgtgaaaacgatgatttagcccactgaagaacagatggcccttaatcaccccatgtggctaaacacacaaatgccaacctcagagacgccttacctttgccctgtctgtcccctctaggctagtcctgctatattaagggttattgcctttctggccctccctgcaatcagcttttgaagtccatggccaagaaggcagtgtgagaataccattatgagagaggtgtttgcttaaagtcatagtccggacaagatcccatggaccccttgatagtctagcagggagccacaaactttagccaatatcttctaattccctgaggattcagaactgcccaccataaaaacataatgggctgtttatctgagcagccagaagataacatcttaaagttacaatctgggttacagactggtgacataaagcaataagaagtacgaataccacccctaccctgggaaaaacaacatgtgaacagtctagtgtatagataccactggatgcccttttstcatgctaataagagccacaactttcccaacatttttctgttaaatagattaaatatacttgggaagaaatggatggaccccgccccttactccatttgcatgctttatactgtttttgaagtttgggactatgttaggaaatattcccactggcacaatcaagtgaatttttgtggcacattttgacttcttttcaaagattgcttaagtcctgtgacattaatcatgatcttctaataatatactacagagattcccaaaaagatactttattcccaaggctccaatactgcaacagatcagactctctttctctctctgtatatatactatatatacatatatatatatatacacacacacacacacacacacacacatatatacatatacatatatatatatataaaattgtatgaataatatattttgttcctgtgattctttgactctctgctgggacagaattaaaatatctcagagttaaaaaaaatcctcttttttccaaacgcctgttatttgtctgcattgctgacattagggaaaagaaaagctaggtttgatatttcaactgcatcaattgaacacgtaatatagtggagactttayaactgtttgtttctggtaagcctgtttgttattattaccagtcaactgggagaatccaatgcctgtaggggatcccacccccaacaaatgaatctctatgattatggagagtgaccaaattaaccacataattgctagacttaacctcattgtatagtatgggtattttaccacatataaatatggccatgaaccaactatatctcaacccacttggttcgttttaaacatttcctgaacatccaataggattgttttcataacttatcttatttaatcataaaagttgtttccatatatcagtccagtatttttaatcttttaaatgttcacatctgcatatatacatttctaatctactgcatttaacaagcagctttcttttttatttgtcccaagagtatgtcatattattattttatgccagattcaatttagtcacaagttttgtctggccttacctactgtattttcttctaccctttcaggaaccctgtaaagtggcagaggaaaagttacacatgaaattgccctaaagtgtttggaaacagcttcagtcacaactgcattgtgctatgcaataaagctaccctcacaggcaactgttgctggaggctgaagcctctggaatgagtctcagggagaatgtactgcatcccaaactgtcttccttaaggatgacaacagtgaaatgtctgccctgcttgggaacatgcactaatgctgctttctcttacaacttgaaaacgttttattggctttaagaatttgtttaatcaaatcctagtgaaggttcttctcactcctggggctgtttagtaaaatatggattagggcaaagccctctaatgtgtccttaggagagtcatcatggtgagatctgtggaggggtaggggaatgaacaggctccagaagattgcttttagccaaaaaagaaggagaaaaatgaggctttggcaggaataactctctgtgtttgaaaccaaactatgaaagaaaagtatgtgagtaaaaaagatttccccaaagattcgtttggaatagaattttcaatataatgaagataaagcagttttgagaaccccctctaacaatattttatttctaatagaattgcctgtgagcaactgaaacaattgacaagggcagggggaaatgattgaatgaactgcatcactgaaataaataaaaatatgcttacctcaggatatcttgttggatttcctaaaatataattatttagctacgtatttgaattagcacataaacaaataaggaacacttttgattttaatatctgaggaatggaaaagtttggaaaaagaaatttcacactatttataagtgaaatatgtctctagtttacatgtacaaattttctgattccaggaatctctgcagtctcgttcctttgagtgttttctaatgagtataatcatctatagtaatagtatttatttacatatggcattgtgctaaggggtaagcaaaaccaattgtgcagagctagtcagtctgatataataaagcatgatacacagttatgtaggggaatatgaacaaatatattcagcaattttcttgcatgagcaatttgaaaacaattttacatgttcaggccagagaatacatgtttgatcagagtaggagaaaggaggtgctttgagaaatgatggaatttcagcctgatggttaactatagcaagggctgtggaactaaataaacctgcatttgggtcctgacttggcccttctaagcaataacatgactttaggcaagttgttaatttttttaaatcccakttttctcatttgtaaaacatagatgacaactgcattttattcatagtttacgtaaaatacttgtgtggcgcctaagcaatggtgttagaccaaaatcagggaatcggtaataatcctttcaagttttaatccattttcatcttttttgacttctttattacatatccttcctcttgtcaatctttcaaatagacatccagtggaatttcctctcttccacattctgaggccatccctagagtttctgtttttagcttccttaactcttttttaccatcgtttcactggcagccagcatgtgaccctgaaaaggtgaattttcatacccttgcagaaaatgttgacagctttcttatctttgtgtcagctatttacgcccatttactcctcactatctttctgacaaacattctcatttattytacctacatcctaaagtaagccctgataaaatgaagcttcaattccactcctaagatctcttctctctttcattgttagtcaccgttagtcgagaatgtaccatttggctcactctggcttaggatctttgtagtcaagcatgctgttctctctctctattttatcaatctggagtcactttaatgttccaaatggaattggagccagatacctcatattctgttcacctccacatgacccttacacaactggcaacaaatctaggatgagaataatgctggctacgattgggaacagagattctgatggaagtctgtagtttcgatagtcataattacaatacacacaattcctgtccttccccaaacacccaacaattggaacaagtacgagctttagcattccttggattaaaaatatgtattttcccgatttcttttaagtagataaagtttactttctactttagtggcaagtatgaatttactgaaatagtaaggttttctgctttacatattcatacaataaaagtagaagataattatgagagatacattcttcttcccagtccaaccatgttataaaaggaggatttaaaaaaatgctgctaccaggtgaaagaattcacagattatctatgatgatcagggtgctgcgttgccactgtaatgataaagtgtgtgtgacataagatgtgctctcaaatctcataaaagttaaaatctatatggaaatatgtcacagggatgaatttgttataaaacatttagatccataaaatattgcattggcttatttatcatctgagtttcctacttgctagatcctcagcataagttaatggggaaccctctaccctccccatttcttttttttttttttttttttttttagatggagtctcgctgtctcccaggctgaagtgcagtgacgcgatccgctcactgcaagctccgcctcccgggttcacgccattctcctgcctcagccttccgagtagctgggactacaggcaaccgccaccacgcccggctaattttttgtatttttagtagagacgaggtttcaccatgttagccaggatggtctcgatctcctgacctcgtgatccgcccgcctcggcctcccaaagtgctgggattacaggcatgagccgccgtgcccggccacttcttttcttttttttaactagtttgttttgttttgttttttctcaaagtcttggtctattgcccaggctggagttcagtggcgggatgtccactcactacaacatccgcctccagggttcaagggattctactgctttagcctcctgagtagctgggcctacggtcatgagccaccatgccaggctaatttttggttttttagcaacctgaccatgttggccaggttggtctcaaactcttcgcctcaagtgatccacccgccttggcctcccaaagtgctgggattacaggcgtgagccactgcgcccggcccagcctccccatttcttgttaaccactcatgacactgtcagaatccctcttgttgctcacttctttttttgctgttgtaagctgtggccttgccatatatctcttaccagcctgcaggcacttgaaggtttaataaggcattttatacagagtagatgttcattaagacaatgttgtccctcagaagctagataagctaaattcaaagcttcttcacgtagatttttgaaagtccatttttctacttaagattgtacaagtgaggtggtgaggatagtgtgatacttatagtttcttgaatgttgtagctctgtgtgcctgcttcctcttaataactttatgttaaagattattgccacagctcaacagtgccatttttacattgcataatatcaatgctaatgtaaaattaaacccttttaaaatgttttcatgaagaaacaaacctgcaagtttttgtgtatgaaagcatttattgtatgcagggaaatggaagggatttccattgcagatgagacagaaatgtaacattccaatttctagaagtatttcagccatctgtgcattttaaactacaacctcttaacatattacttagcactcgcactccttcttccttctccctcatcaagttttatagttatttctaatgctgaatagtttctttctttctttctttcctttcttttccttcttttctttcttttccttcttttctttcttttctttctcatctttcttttctttctcctctttctttccttcattccttccttccttmcttctctccttccttccttctctctctctctttattttttctttctttttgctttctttctctctctcttttctatcctttcttttctctccttttgctttgtctcattgacccataacctctgcttctaattcttcactttcaaatgtctttttccttttttttttaacgttattttttttcttgagatggagtctcactctatctcccaggcaggctggagtgtagtggcacaatctcaactcactgtaacctagacgcctcccaggctcaagtgattctcctgccttagcctcccaagtagctgggattacaggcacttgccaccatgcctggctaatttttgtatttttagtagagacagggtttcaccatgttgggcaagctggtcttaaactccttacctcaggtgatccacctgcctcrgcctcccaaagtgctgggattacagacgtgagccatgttgccaaatgtctttttctaaatacagatataaatgtctttttctaagtacagatagttcctctgccaagaaacattttgagttgttaagataatatagttttctgccctgctacaaatgcatgaaatagagtttgtagaggatctatggtggggaaaatgatggtaaagagattacaggatgcaacagtggcaaaggaagcccagtttatttgctccttcacagctccagaaaatatacagcagtgactctgaagaccttgtttgacggcctcctacaaatagattcaactaacctgagcagtcttgtttaaaatgcagattccttgtcttaacagctagagattacaatccacctgttctttattcaatacacacacaatcaatttcgaggaccactgacaaaaggaatgtgataacagctgatatggccatgagtacactgcacttttcataaggtttttaagccctggaaagccctgatttaaacctgtgattctccagaaactcctgtgctggaggtacaacagtttggaagtatacttggggaaagagaaaacacaagatggaaggaagatctctcttttcacatcgggagcaccctcacaagaaaagaagaaaccagctgcaagtgcatccaaaagcatagaaaccacaaggaggcactatggaaaccacctgcaattaaacccaaatgatctcgagggtaggagtcaatcctgcaggatgttgtcccatgcagagcatggaaaggtgtattttttctttataattctgtttgaatggaaaacaatttagctcaatgtagaagagaagggagagtctcacataaatcaatggaattctgtgatttgaaaaatatttcccaagtgaaatagaacaatgcccagaacaactgttaaacacatttgtcactagatgagctagaatgggaattctaaattacttaattcacgagtgatgaagttttgtttacaatgactttttaaagaggggcacattataagatgctatgatgcatgtcaagattatatcacctagctttattcctagttgagccttattgctagtgtaagaattccctgcagattttgtgatgtcatattatttgacaagcaaaatttgccaaaaggtcaaaggaaggaccacaggctttctgggaagggccacagggctttggagctatagctagataattccttgggcaaaggtggacctataatcctctgtatcataccaccaataatgcacaatcagataattctggaaagaaaacaaaactcaccaaagggcaaacttgagagagcatgagccattcttacagtttactttacttttgttagggtagtgacatcttgagagtaattcttagaatgtctggtcatttgtagcattatccatatgcagaagtttgaaacggagccactcccctagaattggatctgattaaatttatacctctggtatcatcataatgtattttattctgtacacatactatgtatatatcatgtatttagccatttttacagtgatttttccaggatagaatgttttattctaaaggaaaaggcatcatttattatactgcctcttacaatatagtagaaaaacactttatatggaccatttttaaatgtcacatggaatagttagttaatttgagacatgaaatgtctcaaattatgcatattctttaaaaacawtaatattctagaaataagcataatatagaagctcccagccacatcaattatagtgcctttatgtattcagagcttaatttttttattctttgtactctttaaaaaaaattttaattgacacataattgtacatggttatatggtacagagtaatattttgatacatctctacagtgtgtaatgattaaatcartgtgtgattattaaattaacatatccatcacctcaagcgcttatcatttctttgtgatgggaacattcaaaatcccttcttctagctattggaaaacagaataaattgttgttaactgtagtcactctacagtgttgtaaaacgctagaaggtattcctcctatctacctgtaattttgtatctattaaccaaccttttcctatttctccctctctccactcacttcscaacttytggtaaacactattctactctctacwtccatgacatcaactcttttggcttccacatgtaagtgagattgtgcggtatttattttttttgtgcctgcattattttacttaacataatgttctcttggctcatctagagccacaaatgacaaaaaaaaatttcattctttcattctgttttaatggttgtataagattccattgtctatttataccacattttctctatccattcatccattaatggacacataggttgattccatatcttggctattgtgaatagtactgcaataaatacaaaagtgcagatattccctcaacacattgatttccttcctttggatatacacacagttgtgagatggctggagcatacagtcattctatttttggctttttgaggaccctccatactggctgtactaatttatattcccatgaacagtgtataagagttcatttttctctacatcctcaccagcactagttattgtttgtctttttcataatagccattctaaccggggtgaagcaagatctcattgtggatttgacttgcattttcctgatgattagggaggttgagaatattttcatatgcctgttagccattcgtatgtcttcttttaagaaatgattattctgatcaattgtccatttttaaatcagattatttggttttattttgctgatgagttgtttgggttccttgtatatatattctggaaattaattaattaatagtttacaaacattgtcttccattctacaagttgtcttttcactttgttgattgttttctttgctctgcagctttctagtatgatattatttcattgttttatttttgcttttgttgcctggtgtttgaagccttatccataaagttcttgcccagctgaatgtcccaaagcatttcccctatgttttcttttagtagtttcgtagttgtgggtgttccatttaagtaattaatccattttaagttgaattttgtatatggtgagagatgggagtctagtttcattgttcttcatatggatattcagttttcccagcactatttatctattttttaaattttagattcattacatactatgtgcaggttcattgcatggatatattgcatgatgcggagactgtcccttccccaacgtatgttcttgctacttttgtcagaaatcagttgactctatatatgtgggcttattctgggtcctctcttctattccactgatctatgtgtctgtttttatgccactgccaagatatgttggttattataggcttgtagtatattttgaggtcaggtagtttgatgcttttagctttcgttttttttgtggggttttttgctcaggactctttggctatttggggtcttttgtggtttcatacaaattttaggattttttttatttgtgcagagaatgatatttctacctagatgatctgtccaatgctgagagagtggggtgttgaagtccccaactattgttgtattgggatcaatctctctctttacatctttacattaacttgatagggattgcatttaatctgtagattgctttgggtaacaaggctattttaacaatattaattcatccaattcataaacatgggatgttttttactttctgtgtcttcttcaatttatttcatcagtgttttacagttttcatcatagaaatctttgacctccttggttaaatattttctcatatatttttgaagctattgcccattggattgctttcttgatttctttttcaggtagctcactattggtatacagaaagattactgattttttgtaggttgattttgtatcttgtaactttactgaatttgtcaattcaaggaattctttgatggattctttaggtctttatatgtgattatattatctgcaagcagggagtttgactttctcctttcccatgtgaatgccttttatgtttttctcttgcctaattgctctgactnggacttctagtactaggttgaataagaatggtgaaagttagcatccttgtatcattccagttcttacagaaaaagctttcagcattcagtatagtattcatcacagttggctgcgggttcaaatgctctttctgtgtctattgtgatgatcgtatggctttcatcttttattctgttgacgtgatgtaccttgattattgttttgtctaagttgaaccatccttgcatccatgatcacttgatcatggtgtataatctttttaatatgcttttgtattcattttgctagtactttgttgaggatttttttgcatctatattcattgggggtatgagcctatagttttcttattttgttttgtccttatttggttttattatcagggtaatattggcctcatagaatgagtttggaagaattttctcccctttaatatcttggaatagtttgagaagacttggtgttatttattcttccagtatttgttagaattcagctttgaagacctccagttcttggtttctctttgttgggagactttttattactgattctatcttgttatttgttattggtctgttcaggcttttttttttttttctggtttaatcatggtaggttgtatgtatccagaaatgtatctatttcctctaggttttctaatttgttggtttatacttgtgtccgttttatagttgttgcatagttgtacagttggtgtcagttgtaatgtcttgttgttgtatagttgtatagttggtgtcagttgtaatgtcttgtcatgtagttgtatagtcggtgtcagttgtaatgtcttcttcatttctgattttgtttatttggatctcgtctccttttcttagtctagctaattgtcaattttgtttatcttttatttttaaaaacttttcattttgttcatcttttgtattttttggtctctattttgttcatttcttctctgaaacattatttctttacctttactaatttggggtttggtttttcttgctattctagtttttttttagatgcattgttaggttgtttatttgaaatctattgtttattgctataaactgccctcttagtactgtttttgctgtatcccatgggttttggtgagttgtttttctattttcatttgttccaagaattttttaaatttcctttttaaattcttcattgacccattggttattcaggagcatgttgtttaatatccatgtatttgtacagtttccaaaattcctcttgttattgatttctaattttattccattgtggtcagaaaagatatctgatatgatttcaatttttaaaaatcttttgaggcttgttttgtagcctactatatgatctattccagagaatgttccatgtactaatgagaagaatgtgtattctgcagttgtcagataaaatattctttaaacgtctgctaggtctagtgtagattaaatccaaagtttctgtgtggattttctatctagataatccgttcaatgctaagagtggggtattgaagtccctaactattttcatattgggatatctctctctctttacatagaataatatttgctttacgtatctgggtgctccagtgttgggtatttacaattgttaaatactcttgctcaattcatcttattatcaatatgtaatgaccagcactatagatgagcgagctttagggagttatttcctctcttatgttcacttttctcagctgtgaaaatgaacataaaaacctttacccctaagtttttatcagaataaaatgagataatattttaaaactgtagaaaactataaaagtatccaataagtgggtataagtattaatattaaatttgttttctttatcaataaataagaaacatttgaaaatatgttaygcattgaattaccactttctctgaaaattagcctaatttagttgctctcaaatggaggtgattttgctttcctggggattatttggcagtatctagagacattgtggttgccacaacttgaaggtcccactagcatccagtgggtagtgcccaaggatattgctgaacattctacagtgcactggacggttctctatatcaaagcatcgtctgctctgaaatctcaatagtatggacattaagaaatattggtcagattttaattttaaaaaacaaaaatgagacaactgtaaattgcataaatcgcaaggattctaacaaaaaattagagtaatcccctattactyagaagtttgggtaagacagatttgtgttaaacttacagaaggtttgagaggtaggtattataatttcaccaagaatatgctcatgcaccttgaaatgtatgttctgctagagcttaaataatgtgtttagtaattcactgcactgtaaataatactgatcttaactattagaaaactaaagagttttcagtgaaaacgttgctatttagttgtagcacatacaaatggatattttctctgcttaaaaactttctatttctcttttgtgtcagagaggactctagcatttttgagtactagaacaaaggctgtataagtatatataaataatgcaaacttttcaacacgtggctaatttccacggttgaactttctccagttcttatccaaatmtcttccacatcccttctggataaaaatatcttaattcgccatgtctaaaatctgtttgtattcaagacagtcactcaagtcagaataatagaatttaaactacttgatgcacaaatgtttttcatttatagatgtaggctgttgtcaaaatagaatgggaggatgtttggcaatctatctgatgattatttaatacttaaggaatcaggctacttgacatacgtggtacctcccttctagacatttacagtccaaaattctaaggtaatgacatagcaatacacaatttgttccacccacctttaaacaaataataygcgtaattttctttctgtttcctttggactccatgtgcctgaccctgtgccagaaaataagaggacgcttatagcagccttcctaattaatattgacatcacagcatatgtaagttttcattaaagctttgagaggtggttcagtagatgtgaaaatgcagtttcattctaggcagaagagaagttaaaaccctagaagataagaatttaaaaagathatatattgactagcagtgaatggattaaaaaacagttggaagttaaggatgaagcatccaygattcaatataagtactcattgtaaattgtaaattagctctttcaataattctggtacagaagacaattagtaatttgcaggtaaatatttaaaaagtagctcttaaaaaacaaaaacaaaaaaacaaaaccaaggaaaatatccacactactatggtctgaatgtttgtgtcctctcaaaattgatatgttaaaaccttatcaccaatgttataatgttaggaggtagggcttttgagagctaattaggtcatgagggtggcagagccctaaataaatgggattagtgccctcaattaagaggccatcgagagctgtcttgcctctcacaccatgtgaggacgtggtgacaaggtgctgtctatgcaccagaaagtgggccttcacccagtactgaatctcctatcaatctgattttcttctgcttgatcttgaacttcccaccctccagaaatatgagaaatacgtctttgttgtttgtaagctacccagtttatggtattttgttacagcagcccagacagacgaaggcattccacccggctattcattcrtttcaggttttcaatgtggaagtaactagcacagctgagacaagacatgcaacagcaatccatagtccagtatttcaactctatctgtacaatagacataagtaacccccatagcacaaataatagcaaatatagtaaaataattcagaaataatgaatttggggtacataatgcctttgtttctaatayaatttttaagttgtaagtttatataatttaacatttataatggtgtttaaaccaggctcacaaatttctgaagatttagctgtcagttcttgcaagtcagtatgagctggctttagcacaccattgatgggatagtcatttcaatttcccacttaactttgatgtattgagttggaacttgatgtaaaagatgactagtagtcactgtaagtgtattaaaggtcattacgctgggagagaaacatattttttgaaattttgaccgttaaagatatagcagaaaaaacctctggaatagaagttacactatagaattggtatagcagtatttggaaagagtataaatattggaatactttacataatacaaccaagaagagattataggaaaaaagcagaatgagaaacatgattttggggactaagaaacttgtagcttgtttgtgggcttaagatttaaaagggatggttggattacaaaatcttgtgtatcttgttcaaataaagatatatgaccactgactgacaacaataaatcaatttgtacgcatttgtgcatgtgtctgtatgtgtaggggatgtgtgttttcaaatgtggcatctgtcaggccatatttgaaatgcacagtttttattaaggatcctaaaatcttctgtaaggatattttataagtagagcatgaaaaccaagtagacattttctttagattgcctgaaaatttaaggtacatttttgtctttatgccaagagaactggttactttaagagctaaaccctatattgctatggcttttatcaaaaagattccatttactrtattgctctggattttcctgttcctttcttgttttcagaaaaccgcaacaaactattttttttttaagttgaataaaataaaagtagaatgcctcactttggagaggaaaagaatagctaaggtcgagcttaaaggaaaaaattacaaaaaattatgtgccacaatgaagctttgaaaatgaagcattgaacaaatgaaagaatgacagtttgcaaatcaggagtccagaagttttgttttatgattatgttgcagcttaatttctttatatctttctgccattgttaaaaaaaaaaaagcagtcggaacttcaaagcgaccccgcatgtgttctgaatcagggcttcagagctgatgtctgacagcccagaaattaaaacgaaataaatatgccattttaactccaattttttccctaacaacaacaacaacaacaacaaaatcactttttctctatttatgktttttttgttaactttaaaattgtgttcctttggatattttctcatttaccaattatgggactgggcccttagagtgcagagttcccgtagacttcagagggaatttcaggaaacgagagtagatgttaaggcttcgcatcagcctttgtgactttttctgtactttaaaacagaccctcctctcaccccccgctggaaaaaaaaaaaaaaaacagaaaaagacaaagaaccttagtcgttaggccatacccaaacacctgcatttggctgttcttgcattttcttgggatgacggaagcagacatctccaaagaacaaagaaaggctcagggatggtttgtgtttgaaagtgtactagcgtgaatatgaaatgtcagtcactagccagaaatttggcagccatttcttggagcattgaagagagtaattagagtttgacccacagagctctgtgatgtggtggtagagatgaatctttgactaatgtagaatcataaatgcaaggggactttgatatcatctgcaataatttcttagttttacaaatgagaaagtgaggacactgtgtctcagggtggcaaagtgttttgctcaaaataatacagttagtaaagtggtgtaaaattttgatgaattctattatgtggctaatgagatagagatagaagctattgggcttcagagagaaactattgaaacttcaggtagaagctactgggcttcagagagaaacaggcacataaagtggtgtaaaatgttgatgaattctattatgtggctaatgagatagatatagaagctattgagcttcagagagaaacgggcacacaaatgctttggatttaagtgcagcattctacccgcctatcagagccattactcccaaacacctctgccttccttatttaatcaatattcacaaacaaccaaaaagtgtacatacatagaaaacaggagtaaaggacttgctggccatgtcttcgcaaagaaaagcagagaaaagtaaagccactctgggaatatcctaagtttaatgggcttgggttctttcttttctctcccacaatgccatctcaacagtctgcacatctggcctgcagagcatcccagaatgtttatttccggaacctaagaggctttcctgagtattgctggggaagagtccacattttattgatgttagaatacattctgagagtatattgtgcccaatcagagatgatacacttcagtttcaatatgctcttagaagttctgtgaatatttgtggtagacagaaaatagtaaacatgagctgaaatgctttcaaagctcgcaaatatgaaatcatcttatgttacttaggaaagagcaaggagaaggtccaagcactgatctctccrctcagacactgtcatggtttttgcagtcagtcatgagggagaactcaggatcaagcatgggcactgcacaattgaagcatccctctggacctctggatatgaatttgaaaaaaaactgggatttttttttcagtaaatactactgtgtttatttattggttgatgtgccaagaattaggatgttgaactactctttcaaaatctcacaaataaattgaaaatagaaaagacacgtatatatgaaaaaagacagtatctgattgagcaaattctgcaagcaaaatgtctagtgatcagagccacttgtctgaacgttgtggtgggggcagcagagttcctcttgagtggtaagttagacatagatgagaggaggaggaaaagcagatggaaagaaggacacgagtgaagagatcacatttgttctccagcaaccatttgctgcttttactgtgtcctttcattggacaaagtaaataagtacatttttttcatgtattcaccttaactttgggtgttactatmcccgatttattgaagaagaaagggagactcagggaaattaaaaatatgtctgagatgacactgatgaccgtgagagagatgaaattcaggcccccaaatctatgctcttatctaatacatgcaatggaaagcctattcagtgcagtcattttgacaataacggcatattggggccctgattaccaaactgagcagtttaagctcatttgtcattgggtagtttgagatagtgtgtcattagcgttgacagacattaaggtttcacaatcttgattacctattggccaaagtagtgacatcaggaggagaaaccgaggatgacggatartggataatatttaaacacattcaattaaaatcaagtcgatgtgcaaagaaatgcatttctggccatttctgattggagataagggctagaaaaggcgaacaggaagaaaaggagatttcagtctttggttcagtgataatgggtataactgtgacaatgaaaacattcactgatgaaccrtgtttgcagagggagaatggagtgctgaggccagtctctgaggagtacccatgtttctcaggtggaaggaggtagaggagctggcagcttgacatgggggggatggaggggaaagggggaaatccaagaatgtgatggcactaggccaggtgagaagagtgtttcataaagcaagagagataaaactgttaataacagagtattattctagaaatattttatatagcacacttaatatatgatttttatagcttttattactcaggttaagaatagacataagaattttagacttttttcaggtgatcattaaaagttgctcctaagttaagccaccaaaataaccacagtcttactaccttttcacacttattgtctgtctctcctccactaaaagattaatatactcttgggtaatgcattcataacacagtttgaccgcatagctctacaaattgtgccacctccattgttttcaccagaaacaaaacatgaaattattctattgaatcaactagctgaaatgatgaagtatccaaagaacctgcttttccttgtagttaaatgattacggtggaattaatgagagttctcctgtttaaaaacttagttttaatcctaggggcctgaacaattgttttgtgttgagaatcacggcctctcatatttagytctctggttggttcaatagagcccaagttgcttttgtttagtaatattacatgtttcagatcccctgtgcaaatcaagtctttgcccttttaagtcgttggtaataaagaggtaattacaacatagaaaactttttgcaataaatacttgagttaatcagtaataagccacaattaatgtaaaggcctaattataaagaatagccaatgcacttcaaggaaaatttataattgtcagaaacacaaagtcagaagggcgcttatgtatcattttgcaaattatcatttccaaggagttgccccttatcgtgatacctaaactatttatttactatttttggaaggttttcttcatgttggcatgtaactgtttatacttcatcataaagctaaccaatatgatggtaacmagtttggtgttaaatgtgagtaaatagtttcctttaggactatattttgtgagagccaggacacaagtccacttaagcaatcttcctagagaagaaaaaatgtygtatcattctagaattaacaagcagttacataagtcttacaatgttaggcacttttctatgagttttgcaagtattagtatttaaatgttgrgatgtgtctcccaaatctacagccacctgataaaaacaacccattgatgtaaattcattgtttcaaagaagatttcacagggattaaagggaagaagaaaagagcacttgaaagggaggtgggaggcaggggagaagcaaaagaccaggatgaaattccacctcctatacaatttcatggaagtcctagacctggaataacaatgtatactattatttatcttgttgataagcaaatcaaaatctgactgtcttttatttttgttttggtatgcttaagttgttgactactaaaaagtaataaaagttgtcaaaggctctcttctgttccatgggtctatatctctgttttggtaccagtaccatgctgttttagttactgtagccttgtagtatagtttgaagtcaggtagcatgatgcctccagctttgttcttttggcttaggattgacttggcaatgcgggctcttttttggttccatatgaactttaacgtggttttttccaattctgtgaagaaagtcattggtagcttgatggggatggcattgaatctataaattaccttgggcagtatggccattttcacaagattgattcttcctgcccattagcatggaatgttcttccatttgtttgtatcctcttttatttccttgaaaagtggtttgtagttctccttgaagaggtccttcacatcccttgtaagttggattcctaggtgttttattctctttgaagcaattgtgaatgggagttcactcatgatttggctctctgtctgttgttggtgtataagaatgcttgtgatttttacacattgattttgtatcctgagactttgctgaagttgcttatcagcttaaggagattttgggctgagacaatggggttttctagatatacaatcatgtcatctgcaaacagggacaatttgacttcctcttttcctaattgaatgccctttatttccttctcctgcctgattgccctgaccagaacttccaacactatgttgagtaggagtggtgagagagggcatccctgtcttgtgccagttttcaaagggaatgcttccagtttttgtccattcagtaagatattggctgtgggtttgtcatagatagctcttattattttgagatatgtcccatcaatacctaatttattgagcrtttttagcatgaagcgttgttgaattttgtcaaaggccttttctgcatctattgagataatcatgtggtttttgtctttggttctgtttatatgctggattacatttattgattttcgtatgttgaaccagccttgtataccagggatgaagcccacttgatcatggtggataagctttttgatgtgttgctggattcggtttgccagtattttattgaggattcagaaataatgccgcatatctacaactatctgatctttgacaaacctgacaaaaacaagcaatggggaaaggattccctatttaataaatggtgctgggaaaactggctagccatatgtagaaagctgaaactggatcccttccttacaccttatacaaaaatcaattcaagatggattaaagacttacatgttagacctaaaaccataaaaaccgtagaagaaaacctaggcaataccattcaggacataggcatgggcaaggacttcatgtctaaaacaccaaagcaatggcaacaaaagccaaaattgacaaatgggatctaattagactaaagagcttctgcacagcaaacgaaaccaccatcagagtgaacaggcaacctacagaatgggagaaaatttttgcaacctgcttatctgacaaagggctaatatccagaatctacactgaactcaacaaatttacaagaaaaaaacaaccccatcaaaaagtgggtgaaggatatgaacagacacttctcaaaagaagacatttatgcagccaaaacacacatgaaaaaatgctcatcatcactggccatcagagaaatgcaaatcaaaaccgcaatgagataccatctcacaccagttagaatggcaatcattaaaaagtcaggaaacaacaggtgctggagaggatgtggagaaataggaacacttttacactgttggtgggactgttaactagttcaatcattgtggaagtcagtgtggcaattccttagggatctagaactagaaataccatttgacccagccatcccattactgggtatatacccaaaggactataaatcatgctgctataaagacacatgtacacgtatgtttattgcggcactattcacaatagcaaagacttggaaccaacccaaatgtccaacaatgatagactggattaagaaaatgtggcacatatgcactatggaatactatgcagccataacaaaggatgagttcatgtcctttgtagggacatggatgaagctggaaaccatcattctcagcaaactctcacaaggacaaaaaaccaaacaccgcatrttctcactcataggttggaactgcataatgagaacacatggacacaggaaggggaacatcacacactggggcctgttgtggggtggggggaggggggaaggatagcattaggagatatacctaatgctaaatgacgagttaatgggtgcagcacaccaacatggcacatgtatatatatgtaacaaacctgcacgttgtgcacatgtaccctacaacttaaactataataataataattaaaaaacattaattattataaattgcttttataacaagacactgtgctaaattatcctatttttaaattctatatgttttctatataattaaacctattatttataatgtaatgatagtctaatttctttttcccaaaaaaataaaaaatgttgtgagaggatcaactcaaataacacagctagaaggaagccttcaagattttgtagtcagatgaccttcaaacctcaatgcaggtagaaggacctcagtggaaaaactcaaacctcagtagaggaacttactttaaatgcagagatttggattcaaacttggtctgggatgaggctcacaaatctgcattttaacaaacacccaggagattctgattaaccaaaggttaaactccactttaagaaatatgagttagtctgacacttatatttgacccttagagaaacaaagcaaagtccagagatgggaattggcaggtccaattatgcagtaggctatagaacctgagttagatttagttactaatatcatttgaaattattgattaattttatccaaattcagaatcagtggtgccaccctggctctgttgctgatgcttcccaaggtagactagataattttcctaagcagttaacatttttatggtaataaaaatcgacaaatgtctagagagggtttaagcagctggcagagaacgcctgggtgtctcctaagagaagtaatgtctcttcaatgaatttgaagttggaaattattaggatgagttacacaactcttttgacacatggtgataatgataaaagctttattcctttaatagtcactatgaawttcttttgtcacctattattaattaggtaattttgaacacccagttgctattattttctgaagctataatacttgtgattgggataagtgaaatgctgatggtcccactttaataaagtgctactttttttatcttatacatctatccgttaatatccagattctgaaattttaactatttttgaaaaatctaaactcacactctaaggttagagcaatagactcaacagctgcgtatccctagtgtattccagcttgactcccagtctaatgcatctgcgagcttctttggtttgaaaagtagttgcctaatctcattatagacccttgttgaaagatgtccatgacctctcagtttgaacgattctagaatggctagcatagtgcttttttatttattctggtacatacccagctattccccaaagtcctggcaactcctctttatctttgatctccccaccctgaatctgtcctctgcttacctcactctctcatcattcaattccacaatcttgtcatcttctttcagataccttaagtgtcttgaagtgtttgacctaaaatgtcaccgccttacccgaaatactctatctttaccattatgaaggttttatagcattttatataagttggatattgggcttcamtcacaagtagaccatggcttaagatgaaagacctctggcataataaaggaaagactcccttttcatgtcccacacctccaacttggaaaggtaggaaaatcatgcaagataaaaacaatgatccaatacgctatggaatatgtaatgttattccccaaagaatgatagttatatggaaatctttcatggaaattggaggcagtctttattttcttttaatgatttttttaatggcaggtgggaatagacttaaaacagaacaaaaccactgtgataagtatttgaaaagaagcctttattttatccatattgacaggttgaatcatggcatttgtaaagatggtgtaggatcttggccatgtttgtactgcggattttctgccctgatgttggagaattgcctgttttaaaaaaaaggaaggaaaaaaaaaaaactatcctaactatcctattgggcttattagatgcttatgaattttgctaaatgttatcctttcttttgcaaatattctttaagtatttctattaaatggtgatttattttaaaaatcatcaataacaaatgtataatagaagcttatatactatggaattcttaatctttaacaaacacatttagaggcatttcatatttagttaacatacaattgctgtctaatttaatctaaattaaatggttgcttgtaacttacaattcggagggttcctgaacctcgacttatggcaggaaaaataagragtcatcagttttgcccagagggtagatacttatcttttaaaatcaggtattttggtcttgaaattaaaaaccctggtcatttgggaaatgcaattccaaggaatgtttttggcaatgagacatgtccccattttccttagaaggcagcggttttgtttttctaccatttaacaaatctgtgtaatttagctgatacttatctagcactttaaagatgaatgatcatctgtttgtgaagaatatacacattgagattcaatagtaatattttcgttgttgtttgtttgtttttttaaagaccagataacttattgtgtgtcaggtactatgctagttgaaaatatcagtttataaaaagcaactaggcattcagaaaccgtgaggatgattatggcaaatcagtgcataagctttttggcaatggtcaattataagtgttgccatggccatcataacctgagttgaattttgggagtactgccatgaattaatgctgtgctcaaagttaaaatgcaagcttagatgcaagggttagtttgaaaaggaattagttttttgaaggggtgatatatttccttttcaaactgaaaaaatagcaaaaaaatcgaagtggatcagttttaactactgtaagttgtagcttgagtaagaagaatgggttacagtcattaacgtttgaggattatttttcaggcacaactggcactgtgattgtagtactaatgcattaaatttgcacttcaatattacttggatttagccacagaagagtggcttggatgacaggcactaaagtcaactgacccaacctcttatcccaactttgtcattgattgacctttgttgcttgggcaagttaatgttcttataacttgggaagttgtgtggtgaataaatgagataatgcatttcagcacttagcatggtgcctggttatattaggtctcactaacattagtttatacaccatataagggtaatgaacacctttgcttggctcataactatgccttcattgccagcacagttccttggtcacatagtagcttcttagtaggtatctcttaattgaatggatctaccacaattattttttgagtcctcttgaatacatggtgttttagttttaccctgtgtaaaactaaatcaatgaaattttgtataagttaaatttttttagttaaatacatctttttttttccatacacctatgtaagcaagagtttgtggccagaaagacttgagcctttttcatttggtgtgttatatttatttggacttgaacttcttccccacacatctctcactcctcaccctcaccyccatctttgaacatgattttctacttatattggccacaatgtcttttttaaaaacattgttcaaaaaggatactagatattctatagcagatatatcataagagcataacatttttcatgttttacttgctcttctttacttttcctcaaaaaattgctctctggtatcactatgggccttagtttcctcrtccacttcttaaaacgatagaattggagtatataaacttgcaattatatctagatctgtaattgttaaatgaaaagctttcattaaaagtataaatactggccaagcatggtggctcacacctgtaatcccagaactctgggaggccgaggcaggaggattgcttcaggccaggagttctagaccagcctgggcaacatagtaagaccctgtccttataaaaaaaattgaaaaattagtagggtgtggtagtgggatgtaatccaagctagtcagtagactgaggtgggaggattgtttgggccctgtaattttaggttaagtgagctatgatgatgccactacactccagcctggatgacagagtgagacttcatctccaaaaaaatgtataaatactgagcatctgccatatgccagactctgtttgataaactgtgtatccattttgcagttggcctttaatgattaaatattcatttcaaacctgtgatgtagaataagtagtatttaattttatttataggtaatataactgaggttcaaatagagtttataataactcatatctaatagaagtatcagaattatgtataaaactgtggcacagagtaggtattttgtaaataatagttgatttgtagttggatcrtagatggatggagggatgggtgaatggatggatggatggattgatggataactaaagttccagtcaatcattcttgccatttattttctcaggaatttctgaggatcaattttgtcttacaaaaaataatggcattgaagtattctgttgtttcagactttttttaggatacaatttattcatttgctttcaaaaggtgctgagaatataaacttacctcctggagcatcactgactagaagagtaaaaggatttttactgtgattgaaaatgctttctttaaaacatatgcagtatttatagggctgcttggaataagccaattgaaagatttaatggtaataatctccatatttcttataaaattgatttccggattcagtgaacttggaaagagtcctgggacatcaaataagtaaaatcttaacatgaaatgaatcttcagaatatgttcataaatttacattttaaacataaccagataatatatatctttacccrttattaaggtgatahtttaatgaaaatttttcatttgcatgaaataaacctttttggctacagatgaaaggactttatggtagcgacaatggttctgtgagttaaatgatcccaacatcatcaggaatgaatcacaagtgcctaccatatgaattacagcaccatgagtcttaaaaaggtatttctgtggaaagcattcctcccatctgcaacaatcagattctgctttgaagtcctgctggagagcctcacaatacatgagactgccacatgctacccgaatttctctctctacttgagcctgactgcattttcctaaagaataacatggtaacttaatgaccagggggtttagagagggaggaaaatggctacagtttttataattagacttccctggatgtgcattcttcagtaatactttttggatataactacagaaggtagtccaatggatgagaaaaatttaatttcaaatgaaaatagggcaacaatgtgtgactcctttggtccctactatattaaatgtgtggtgaagtcttcataaacatttcaggcccaaatgtaattgacatgttaataaatgagtaaattggtagtgagactttttagccatagaagagttacaaattaatacaaatcatcatgagataggtgtcagtgagtatttcaaaagctttcactcctgcttatcttgatgccagtgcctctgctgctgaatggcagagtgaggatggaggttgccagaatcatttttgttgtttctttttttaactagaggctttcctcaatagaaagaaaataatagttggggggagacttgtcatgaatgggagactggcatcagcaacgtcaacaaatgtttaagtagaagtaaaatgacttatccaatagatcacaatgtgtcaccatttctttattaaccaaacgaatcatgatcgaggtatctttctctgagaattggctgctgattctagagtctgttctattttactacagggaggcaggatagcaatagtaactaaattgtaggttggagagaattccctgttcaacctactacagcattaactcagttttggcctccatagagacttccaattccatttgcaattttgtaatagaaacagattttgtgggagaatctctcatttctctgagcttctatcaaaacattaggttattcaaaataggcattgctaaatatacatgggttctaaaagaaaaaagtttatacagttctgactgtactttgttctccttttggctttatgtgctttaggttctagcccatgctctggtgaaacagataagttagcaataaaaagagcaaggcttcttccaaccctaataatacataataacactagaataagataaacactaacatacattggtcactttgattatacactaggctattatttgctatcttgtatattaaactaaaaacctaaagcacacttaaatatctaaaaacagaattgcttggtgcatgggtacattttaaatgatattgtagagaacatgaaaaatgtatccactatttgatatttgtaaatgtatttttaaaaaaccagaatgattttgttttatttagaaaatacaacaagaagcatgaaatacacaaaggtagaattggctatttctggtcgatggaactatgtatttattattatttataattatttgatgatgatcatttattttatttatttatcaaataaaagataacactttatatgatatatcacaacatagagcctgtttattattatactatttatttattattttctatcatcttccaaatttcktacaacgagaatgcaataattttggttttttaatatagttttttttaatgaaaattaaaataaagctagttaaggttgtttcctttcactaccactattctctgggaactatttggaaatgttagagagaagcatttgagacatgtcaccttgaaggatgaatccttttgtgtcatctgacttggttattaaatacgtatataaggcttaatctttgagccttcttagagcaacttttcatttcaaacaacttctaaactagagaaaatactgacacaatatgatttcttagcagaaaccaacccctataaagtatcaggaaatcaaattgaaattgataatttgaaaccattaccatattgatagcttatttaattctatttttataatcaaaaatattaaatttgtttctactaaattaatggaaccaaacagaggatttcattctgaaaaggcccttctaattctctttctcagtggtttcaaggtcatggtaattaccagttcagctccacttggtcatcaaaagaaatgatttgttacaatgtagaatccttctcatgcttataatttaatgctgatagacaatttttaaaacaaccaggctacatgtaggattctttagtagtagatgtggtgtttgattaatgcctcattctaaaatatttcctaaaatwaaagsttaagttaccaaatctcttttaaaaagtatctgacacggctgggcatggtagcttacgcctgtaattccagcactttgggaggcaaaggctggtggatcacgaggtcaagagatcgagactatcctggccaaccaacatggtgaaaccgcgtctctactaaaaatacaaaaattagctgggtgtggtggtgcacgcctgtagtccagctactcgggaggctgaggcaggagaattgcttgaacccgggaggtggaggttgcagtgagctgagatcacgccactgcactctagcccaggtgacacagcaagacgccgcctcaaaaaaaaaaatatctgaaacaatatgatttcttagcagaaaccaacacctataaagtatacagattcttttgtagtcaatacaggtaatagggatgtctgtcaaggctgatttttagtcagtgcatcccaatatgaacctgtacatgtggctgctccgaggcatccaagctcctccctcagctctgcactcaattaggaaactgatgccctatgtggttgttgagaaccccgttccatctctatgtccagtgattgcttgagcctacaaggtaccatggtataggaacacgttttccacttaatcacttagcccatcagccctcacactcaaaacactcaaccccgcttgaggaaggtctgtgctaaaatttttcaactctgaaggtgttattaagtttactgtcaaatgtaggatgagcttttgtgtctttaatgaagctagaagtaaatatgattacatgaaacttgcaatcatgcctactaaaattgttatatatgctctaatctaacacacacatacacacaaacacacacacacacacgtacacatgccactgaaacctttaatatgtcctgaaaaataatamcttcacctgggtagccacactcggctggcatttttaatgtttctaatatgtacagtaacagtggacacagcagaattcaggwtaataaaattaaaaaaaaatactgaattgcttattttgatttgaagaaagggcatgggccttgtagaactttccttacatcacttgaatgttttgtgcatgcataacttagagttcagctgcctcagtctctgactgcagagatcacatgggtaacatgtgaatggaaataaaccctgtaggtaaaagaaagaggaatttggatagagatcaaagattaacttcattccactctttccttccactttttactatcccatctaaatttggcattttatgggactttttttcattgccagaggaaagagtgaacttaaaccagatttggatcgctctstctctttctttctttaatccagtgatttggtttgttcartagtgactttagataattgaattctcagttactagaaattattagtaagatttctggcttgatttattatatcttttaaaattataactgtagccctggtttaggttacagaaaaagcggtctagaatatttaataatatgattaacagaaatgtgtccttacctattaggttttttacataaattttctagaatggtactaattactatgtgctattaatcttggctyagggaaagaacatttctaagcattagggatcaaaattttgygttacttcttttctgaatgtttatcattctttttattgtcatcccggtaataaggtagtttagtgtggacagcctcattcctaagtggcctgggtaaaagattcttatcggcatcataatgaggtccataggaattgagaaaaactaaaatgcttgataacagtttttaactaatttttaaatcctttttaaatgtatttttgtcaagaattttaaaacgtgataattgtaaagtgactaatttgacttccatccaaatagtagttaagtggttaaaatcaacattaaagtgcttcaagatattgaggagattcactcatcctgttcatggtgaacatcaagtgctagaccagaagggaaaatctaggcagttgtttaccaagtggattattttaatgcattaccgggattaatgtattattttattgttcaaaatagaagcaacctaatttagtttcaggctctcattatctgatgattttataggctttcattaaattctagtgaatacatcctgagaatttattttcttttcaaactaaagactatgacaattaaaagatcattggttgccaggagttgaggggcagagagggaggatgaataggtaaatcacaggaaattttcagggcagtcattgattctstctgatagtataatggtggatgcgtgacattatgcatttgtcaaaacccacagaatgtacaacacaaagtgtgaacctcaactatactttagttaataataatgcatcggtactggcttatcartcataacaaatgtaccaaaatgatgcaaaatgttaatatggaaagaaagagactggatatggaacttgctgtacttcctgctcagtttttctgtaaatacaaaactgctctaaaaaataaaatctatgaattatgaaaaattcaattgatttaaaaattaaaattttttgctgtaagttcacaaagcatataaaaaatgaaatgttctactgaaacacgtgttttyatttatttttatttaccgtaccttttggcaattgcccctgaaattggacaggtcggatgccatgataattttttctaaatgttgaatgagaaacattcaaatttggcaatatgagacattacatattcttaaacacttttatgtgaaagtatctcaaaatgctgaattaaatattaaaatcatccttttaaatttgtggttgacttccaaaagatagaaaaaggagagtaaatcctgaagttgttgactaccctgggggcatctataccaaaatctccaatcggtcggagttggaacattaataatctactgcatattgcaaaagagggtcagaggcttgggcctaagaaggggaggsaatttaactggagaccagaataaagaaagaatgacaaatggccaacactttggaagagaataaataggagaaaagaaaatactcctaaataaaacatcatatctatcttagcttttgccaccaataaagggaatttccgaaagaaagtttcagagaaagagagagaaagaacgtaagagagaaagagaaaaagaagaaagaaagatagaaagaargaaggaaagaaggaaggaaggaaaaaaagaaagaaagaaagaaagaaagaaagaaaggatgtcctgactttcttctccatgagaatttgtaataaagttttaaggtccatatttataatatacatgtgcaaacaaaaacagcaaactccacaaccagtcttgccatataagaatttaaaataggtcctagaaggtagtgtcccagatatccagcaaaagcaaacaatatcacacttgagccagacttgaatgacagataccatattcaaccccagtgtmttagttcaggctgctgtatcaaaatacgatagactgatagcttataaacaacagaaatttatttctcacagttctggttrctgtaagtctgagatcagcttgccagcatggtcaggttctggtcagggccttctggaataaagactgccaagtaaagacttggacccttagaaggcaacaagagaactagaggactctgggtcctttttgttaagggtacaaatctaatttacgaggactctacctaatctggattaaagagtgccaacttctccttggatccttagaaggcracaagagagctagaggactctctctggggtcccttttgtaagggtactgatctcattcatgaagactctacataattatcaaaggctgcctctcaaaaacatcacattggaggttagaatttccatatataaattttggggtgtagtcacattcagtccattgcaccaagcttcaaatatttttcacatataaagttacaatgaatacaagctcaaagtactccacaaattaaataaattaataaaagttttttaaaaaggggataattaaggcagcatgaacatgaatcagcagaaacaacagagagcaaactaaaccaaaagatttcaaatgtcagttacagaatataaaataattatgctgaaagaaataaaagaagaaataaaaacataaacaaggagttaagaaagtatcataatgaccaataagtcacgaaatagaacaaaattggaattctagagttaaataatacaatcacagaaatgaaaatatcactaaagatgtgatgtagcagattagagatgtctgaagagggaaagtctggaagacagctctgattcaaaaatatacgtaatgcaggacagagagagatggaaaatatgaaagagaacttagatcaaggaaatatttacagacaatgtccacctacatctatgtggaacttcaaaataatgtaatagagtaaacaaacattttatttcagcaaatttaaacaatgaaataaaagaaggaaacgcctgtaaaaatataacttaggacgatatagaaagcaggtgtagtgatataatccctttaaaaattcaatcaatactaaaaatattcttcaaagtgaacacaagaccctaatggtttcatacgagatttgtccccaacattctggcatcagataataaaaacagagggtcccaaccacatcaaaattcattatggccaatacaggaatggaaaagtacagattaaccccattcatgaacatactcaaaaaaatcttaaagcattagcaaaacaaatccaggtgtgtactaaaaagataatacattatgaccaagcttattttacttcctaaatgcaatgatggcttcatatttgaaatattaattaatgtaactaacagcactgtgaaattatggggaaaagtctatctgtgtaaagaaataattagattaaattacatttgtaatgaaatctctaagttaaattagaaatagaaaactcccctcttacactgaatgaaaacacaataagatgccatttttttgccacccacttggcaaaccataccaaatgttggcaaggatgtgacttaactggaattcttacatatactgtttctgagggtggggcttggtaatagccctttggaaataatctggcattatttagcagatttttaagactcaacaattctgtttcacatgtgcatatgtgcaccagaagacccgtgtaagaatgttcatggcgacgttatttgtaacgacaaaaaaactggaatttggtgataacaagaaaaccaactctctgccaatagaagaatgggtaacctctgttgacatataatggcctactagacagcaaaaaaactatagctacagggatcaacaaagatgagctaacaaaatacatgaaaatagcaagttgcaaaagtgtaaaaccatttttataaagttgaaaaacaaggaaatttagaaaaggaaagcaatggaaktataaactcaggatcctgatctcccacaaggaggaggatagctactgtcagagaaaggcacatgggggttgaaaaagtgttgctaacttaattttccttaagttggaaggtaaaaaagcagatatttgtcatattattgtattttataactcgtatagatgttattcatattttgcatttatcaaatgtttcataataaaataatgcttataaaatctaatgtaatagattttacattacattagataatgtaaatattatattagataatgtaaatttgtaatatatagcaatttggggcatagaaaactttctataataaaggccattgakagcgacaggaagcatatggtaagcaaatggaagagtttaccttgttaacacctgctgaagagtattcagtttttttatccagatacatacagaccatgttatgaaaagcagccctgtgcactggtgaagagcnagattggtgccrgtcttggttgtgatacttcttagctgtgggatcttgggctttgggtcccttatctgtraaayagagataataataggacctaatccataaagttattttaagtattggatgagttagcacacagaaaatgcttagtaatgacttactcaaaatacatgctcaatgttagattctagtgatcactttctcttgatttaatactttgaaatgttctgtttgtattatggtaggttttggtcatttgacgaagcaattgatgacattggctgatggacgtgtggtgttggctctagaaggaggacatgatctcacagccatctgtgatgcatcagaagcctgtgtaaatgcccttctaggaaatgaggtaaaaaagtaaaagtacaaaggggcaggggtaaagaatcagggatgtatgcatgcatatttttaaactaaaaaaaaattctgcrtactcagaaagcttaacattgctcttaccattaagaaagaaggtaagccttagataagtttacatgttctcgtatactacaatgttatcccaggtacagaatccacatagcactcactcccttcaatcaggttagccatggagctcaaaaataagaacattttgtctactgacccaaccaatgagtacggaaacattgaataagaaataaaactttaaaaaatgtctggaggtttcttgtagggttatgttatttctgggaaaaaaaaactgttttaaaaattggtaaactatttttgtcaccatttaagaattctttatgctaagaggtaggtatttccatcttacagatggtgagaatgagtctcaaaaatgttgagaaatccatccaaagtcatgcagtcagaatgcattataagatccaagacatgaacatgaatctaaatggccaaagaccattatattttctttcacatcacatggctacattgcaacatactttctgactactctgcagaattcagatccaattgctatgaggttcacttccagctcatggcaacattttcaaccaattagttgcaattcagcaaatatttcaaagtttctatgtattcattaatattatccattaatctattttctatagtgattatacagtagtgttaagactatcatatgcattttgcctttcttttatgaatttgcaatatgattttgcttattagataaacatatacaaaatctttttaaaaatctatcattcatatcatttttttaactgtaatgcatgcctttgcctgtagtattttataaaacaaaatgtaccttttcttctgcacatagaacacatagttactattgtcatcattattttacaaacctgtaatgtttccatatgattatttttcatatatattgaagtaaaaatgtatgttgttaatttgaagaaaaaatatgagagagaaaacttaagcattgctcaagtactttgctcttgttaattttttttttttttttttttttttctgagatagagtctcgctctgtcgcccaggctggagtgcagtggcgcgatctcggctcactgcaacctccgccacccgggttgaagtgattcccctgcctcagccacccaagtagctgggattacaggtgtgcaccatcacgcccagctaatttttgtatttttagtagagacggggtttcaccatgttggctaggctggtctcgaactcctgacctcgtgatctgcccgcctcggcctcccaaagtgctggaattacaggcctgaaccaccgtgcctggctgtcttgttaattttagacagcacagtaactcaaaggatgtaattatctaatgattagtgtcaacaaagtgctgctgtttcagatcacgcacaattcaacgtgtgtaaaattttctaaaatgttagtgtctttctgtgatccctgtacaccaataatgtcaaacaggatgttgagtgtttttttgtggcagtaagggagtgcaagaaataaatgctatttttattttataagttgatgttggggtgcttctttgtcccctagataacattttttgcatagtcacctgtattctgaaatcacttatttgattttaattatagaaatatgttacagaagcataataatattaatatttgcattataaaggcttacaccagatgtgcagacaatcagaataggttgtggatctgtagctccatggataattgacctagccagaaagaaatgttacctgattgcaaaagccaactacttttcttcctatgtggaaggaaatcagggattttactggctttctttgaacacatgcattcaaatgtctctatactcataatcttttgctcttaacccaacatttccaatgaggatggagtgatctcccctatgatctctttctttaagaaatgattatgtttcagaacagattcaactgtgtggagttacatgtttttcttaatttatctgtgtttactrtaaagcaaagtgtgttttgtaccttgctgccattctatgaccttttgactgggagaactctggccattttagtacacgtgcttttcgtggagatgaaatacactgcttttgtagagcaawtagtgactttaaaattgatggcatgagccgagatcccgccactgcactccagcctgggcgacagagcgagactccgtctcaaaaaaaaaaaaaaaaaaaaaaaaattgatggcaatatgagagattacatattcttaaatattcctatatgaaagtatctcgctggccgggcgcggtgtctcacgcctgtaatcgcagcactttgggaggccgaggcgggtggatcacgaggtcatgagatcaagaccatcctggctaacactgtgaaaccctgtctctactaaaaatacaaaaaattagcggggcgtgttggcaggcgcctgtagtcccagctactccggagcctgagtcaggagaatggcatgaacccgagaggtggagcttgcagtgagccgagatggcaccactgcattccagcctgggcgacagaggcgagactccgtctcaaaaaaaataataataaaaaaaaatctcaaaatgctgaattaaatattaaaaccacccttttaaatttatgaatgacttccaaaaagatagaaaaaggagagtgaatactgcaactgttggctaccttggaggcatctgtttgaaaatcaccaactggtcagagtttgaacattaataatctactgcatattgcaaaagatagtcaaagccttgggcctaagaaggaaagggaatttaattggagaccagaacgcagaaagaatgacaatgatgtcacctgatttaaagtgtgagacctgtgccttttctctatatgtttagaaakaccaggcttgagaaagagaaaggaataaaggtattgctggacaatattaaacctgaccatgtgagtgtttagattgctaaaatttccagtaagtgctaactgaaatgattatttttggctatattgactattgaacttactaattaatatgtatgtcytatggtaaatttgagttagttattatgatgccctaaataccagcttgtcccttttggttggtggtcttcagttgcataagcacaacctaaaattttttcaatataaactaaaggaagggaggtttaaataatgtatgcttttctatattttttgcattaaactttcttgggaacataaataagaatatagaattcctagcagatactttaagggtaacaatgaatatgggattattgaatttttgaaaggtaaattttgttgtgtcaggtctatcagtatatggaagaacaaagttaagaaaaagaaagattattaaaagtgaaaaattaaagaaaaatacaaatgtgttgtacattataattcatttggaaaaaggaaatgaaaatataatacataaaacacattaaagaatggagagttcttctcactttcattgacaatataatttataatccaaggcctggttttctgtatttttttccaggtcaaaratcattatgactacactgaagttttaaattttattcttttagaaaagtaatatataaggcgtattacatgtacttcaccattttttaaaaagtgcatatatgtagttttcacagtagttttatatggtaagctgtaggtaaaaaaatacaaaaggatgtctttcagattgcgatttcaaatcccagtttccctccaaaccctttattcagtgattaatagagcaattagaactcattatctgggatttcacttttacaaataacaaaatgtagtaaagcttgaacttaaaacattggcagaacccgctttagtttctcaacrctgaacwtgcaattgaactcccattagaaaggtcaagaggggcctttctgagggcctctgctctttgtcagatgtatttattcatgtgcagaggattagaattcataaacattttgccagttttttgaatgctatttctttcccttgttgtttttggccaggccatgtcaatacagcaaaattttgcttcttagggcttatgatcagcagaataatatgtattacataacccaaagtaattataaaatcagcaggaaccgttagctgtgcatctgtgtagacacatagaggggtaccaaaaaacttgatttttaaaaattttagttatctgagtgttgcacccaaaacatgcattttcttctttttaaatatctttatcatgaaaatgatctacttagcaaaacatctcttaactattcttttcagaaatatgtacaaggtcagtcaaaatagtatactattggattaaaactaatttgagcatggtacaggaaattcctggaggcaactgatattgaagacataccagaagtccatttttttctttttcttggcaaagtttagaacttagatttatcagtccaatcagtgcatgatgaatatttttgatctttttcaatgaagcacttagaaacaccagcttggggtttgcaagaaattgaagtgaatatttaaatgagaagaatcattaagttgcttggaaaggcattagggatacttgtgtcaataaccacatagtttttagaattcrtaatagaaacatctgtgaggttcccagaaaatctgattttggtaatctgtatttgagctgattggcaaacagtgtcacagttgctttaaggccaaatttgcctactgttatgcaaagccaattagtggcaccccgggttacttcctctgaaagaaattttcccaagaggtgagaaaagctttaagcagttgccattcctatggaatctaaaacaaaaacattgaaaaacttcaagcaagtcaaagaaaggagaggacatgtagtagtagaagccttgggtagtgagttgagaacatggccattagaagatcacctgtcaataccgaataaatgatgatttctaagcttgttagaggaaaaaagcaaaacaaattgtcataggtctggaagctgttgagattatggtaaatcctctagtactgcaagttcagcatttacacttggagcatatagcatgttttgatttccctcactctttttaaaatttggattctgatttctttttttgtctcttcttttttttttcttttctttccctccctgcctccctcccgttattcttcacttcctcactcccttcaaccctctctccctttctccctccctctctccastttctttttaataactgctatctcctgttgagtatgctcagctgcttctatttgacttgaatttcacaaacagtggctaaacttagtgattgtgttggttgataatcttttaaagatgacgttttgctctaaagctgctgaaacagtctcttgaattgactctagtaagtgttgacaaccacccctgaggtgaactcttgagatgttgttgtccaagttgctcatcaggggtttgttttcattggattccgaatagggaagttgttttgccatctttttcatcctttagattatgtatggctgaagcttagtccattggggaattggtgtgaatctgggaaagcttacaagctcctaaatagttgccattcatgagtaaaggaaggaggaactgaatacagggacaatgtatgatatgtcagaatagtgtttttctatggttttcttttaaactttgaaggctctccatactctgaaagagaatgtgtgggtaatctaaagagaataaaactgtttggggaaaatattatttgaagatacttttcagtgtagatgtggcctgtgatgttgcatttcttatattcaacaaggcagagccaaattggttgtggatttatttttgtttatatcttttatcaaatgccaaatgaagtggacgttgtttggataattcaaaactccattatataaattttctatatagtctttaggtttttcagagggtgttaaggagaatatgggccagggacctggatatttcacaggttgtggtaaccaataaaagaaagaaagcagttctttgccatggtgaaacaaacatgaaatgacattcatttatctgaccattcattagtcttttattgggcatgtattttgtgcccaaaagtttcaatataagtaaaagtaaaacaaagtgctttgggaatataacataaaaccattgtttttaactacagagatcgaggaatattttaacatttaattggtcttgaataaaaaaatcagactaatatgagctaatgtctaaggaaaagattatcatgtaatgggaaagcatagataaagacattaagacttcttggaattgtggatggctctgtttggatttgttcgttttgtttttggtagaggagaggtatgttgagtagaataaaagtatatactggggctgaatctgggtaatggaatatcataaggaattagaatttctgtgaaaaaatatggaagctttgaataaatgaatcccaagctttggtgtaaaacaacaacagcaacaaaacagcattttgtttgtttgtttgttttggagatggcagaagcttgtagaagaaaacaaagcttactatgaaaataactattagcaattttcccagataatcaataaacaaaattatactctaaccacaatatgctggaactgactgtaaatgacttgtgaaagccaattgtgtgtatctctgcttaaatctaagtttaataacatcacgttagtagcttgaaataggccatggtgggaatatttacaccacagaaatcagcaaatactacaaattaggactactacttggacagttagcagttcaacatttaccggcacaccactgctacataatgtgaaacaggtcttgttagcagaaaagtcaacacttggaaaagagtatcatacaaaatctctttaataaaataaaaaaaattaaagaaaatattgaaaaatataaaattagcagattaaaggaagaagagattaaaaaagcaaataaagagaatactaaggcacacaaagtgaaacaggacttaacaaatttgactgtcaaatttaaacttacttgcagaaacaggggcaagtaaacaagatttttggcatttaatgtgagccaagccttcttcataacaattgatatccagactacagacattatgttggaaaactacacatacagccctgaacgaacttcccttcaatgttgttagaactttagtttgacatgcacttttcaacatatgtagtattttcctaactctactgtgtggttctaactgttttctcattatgttgtatatctacaaacttaccttaatgattaaacaagaatatcaataatctgaatcatccaacaaattgtatttattatcctctttccaattgaccgctatgccttcttccatttatttttaggtttatttttaattacttagttggtgactgccatagatgtttaaatatatcatgtgcaaactgtccatggttaagcatcatggaaattatgggatactatttgggtttgatatggaacagaggcatcttctcatagtcttcctcctttcattcattggctgatgtattgtttaacctacatttctctaagccatagtagttttggacaaaactcagttaatagaacaataactacagtaataatctcggagtctgactcactggtccctcttaccttattcaaggaattcctgcaatatctcatgtgagctgatgaccatgactgttccctttacctcttggtcttcctgttactctcataagacttatgtcactgctattgaccagagatatttctttattgctgtgttgatatcaccctatgtcatccacatgtaggtaggatgcaggcagacgcaatctgaataatttcaatagtttgtcagtgtagtaacttgattgtcaatacaatcaccctgattctgatatttcccccaatctatttggtcaagaattttaatgacttcaaacaaataaaataggttatttcaagaatgactcatgaatcacaatttggataaaattataaccagatttacttacacaatcaaattaaacatacacaactaattgcagacttctctaagacaattattcaaatgagagttgagtttccaccaccaatccctcctcactagggaattgataatagttcattagcatggagagtcaggtcttcattacaatctgcttcccttgtcctcttggtcttgattatcatattcttccaacgttccacaatatctttgactctgacaactgaaccctttctgcattttgtctgagtcgctttgcatgttgcagggggactttcagctttctttgtaagtaaatttgtggccttgtacctaagaatataacatgttgctcttatgcaaaatatataatctcactttgtttcctggaaggacagtaatacrgtggaaagaacatgaactcaagatctagactttgtttccctattctcttacatcacagtgcttttaattttttttggatttttaatttttgctacactgtttttaattgtaaaatataacaattatacagaaaactgcaaaacacaaatgtacaactcaatgaaatatcacagagatcacatatgtaatgatcaaccaagagatagagtaatgtcagctctatctctatgaaaagcccccacattccttttctaactagtatcccctttctcttttctgaaagtaaccaattttctgatgtctaagactatattttaatttgtagctttatatccatgaaatcatacaatatataattcttactcattttgcttaagagatttatccatgttattgcagctagctatatttgattcatttccattcacatatagtattccattctataaaaataayttttagggaaatgtcacagtttatttacatattctgcttttgacagataaagggaatttttccagtttgggggctattgtatctaatgttgtgatggacattttatatgtgtttcttggtgcacttgtaccgacatttttgttgaatatatttctacaagtggtattgctgaatcctgaaatatgcatgtgtttaaatgtgttttccatagtggcagttacaatttgtactcctaccagtggcatacaagtgtttacacagttctgtatccttctaatactccatattgtcagtcttttaaaatcttagccattctgttggaggtgtagtagtatatcaccatggttttgatttgcccagacgctaatgcggtaaagcagttcttcatctatttattgatcatttgtacatactgtttttgaagtatctattcaaaactttggtccaccttcatattgtctttttccttactgatttagcaattctttataggttctagtgttagtttcatgtgttgaaatatcttgtcttttcaccgtcttaaaggtgacctttgataattgaaagtaactttttaatgtggtataatttatcaatcttttcctgtaggattggttctttttgtaatctgtttaagtattctttctggattcccaaagtcaagaaaagattatttttattctttccttcctcttttctgaaaggtttattttttgacttcaacatttagatgcatagttcatctggcattgaatatgtatatggcataatatagaggtcaggtttgtttgtttcaatgtgaatatacagttgatcaagtaccacttatagaaaagaccatccattcagccaggcacagtggctcatgcctgtaatcccagcactttgggaggccaaggtgggcgaatcacgaggtcagaagtttgagaccakcctaaccaacatggtgaaaccccatctctactaaaaatacaaaaattagctgggcgtggtggtgcgcacctgtattcccagctactcaggaggctgaggctggagaatcggttgaacccaggaggcagaggttgcattgagccgagatagcaccactgcactccagcctgggtgatagtacaagactccgtctcaaaaaaaaaaaaaaaaaaaaaaaaagaccatccattcattatggctcagtagtgttaactttatccatgtatacatggagagtctattctatttcacaggtttctctctttttatgtgatattatcagactgtcttaactactgtagttttataaaacgtcttgatatctgstagaacaaatctttctgtttgtttttcttcttcaagacagtcttggctacatttggccccactgcatttttatataaaattttagaatcagcttgggtggttgtacaaatcacatataagtggatataaatggatttagttcaccaattaagacaaaggtgataacattgtaataacagatgctctttgaagggaagctttctgtaatataattataaggaaactttgaatgaaggaaatgaaaaaaaatttatccacaagaactaactgaaggaaaattcatgtgaccatattaatatcagataaaaatggactttaaggcaagaaaaaagagaaaatagagatcaaaagaggtgtttcatactgataaaatattctatgaaccaagaagataaaacaattcaaactttttgtgtctaagacagcatgaaaacatattaagtatacatggaaagaaccaaatgaaaaaatwggcaaaaccacaatcatcataacaaattttagtacacgtctctcagtaactgataaaccatgaagaaaataaaagtgaagggtgatgtggaagatttaaacacttgataaacttgctataatttaaatatataatggagtatatatcccctaacatgacagaatatcattcttttcaaggacattcttaacatttttaaaaatagaccgtatatggagcataaagcaagtttcaataaatttgaactaattgaattcatacatagtataatttcttaccacagtgaggtaattagaaaatcgtatatattttgagatttcaaatatactctaattcatgtgtccaaagaaatcacagtgaaatactagaaagtattctgaaataaagcattatgaaaatataacatgtgaaaacttgtgtgatatataaagctgaacttagagaaacatatgcttttaaatgtatatattagaaaagaagaaaacttaaaattaatgtttaaaagcatatatctcattagagaatcaaagcagcaaattaaatgcaaagaaaccaaagaagatataaataaaatgataaaatagaaaacaagcatatatgtaagatttttaaagtcagaggttgattctttgaaataagtagtaaaattgatcraactctagtaagactgaccaacaaagaaaamgcatgcatgcccagcactgggaaagaaaaggagacttcactacagattttratgttattaaaaggatgacaagaaaatattaaaataaactttacgtaaacatttcaaaaacttatgaaatggaatatattaaatggaaaaattataataaaaatgcaaccttgcaagrctgaataaaaatacagcaaatgtgagtggttctttaattacttacaaaactgggtttttaaaactaaatttaccaggagaaaacacaaaacccatatagcttcaccaggaaattctaccaggaatttaaggaaaaaataacaccaatcacaaattgttttagaataaaggaatggatggtaggaagaatccatcacaaataattttttgaggcctatgtgataccaataccaaaaacttaacagaatatcacaagaaaggaatattataagagaatatttctcatagtcatagtagttaaaaccctaaataaaatattagcagttcatcaagatcttaaatgttcataaaaattgggtttactctagaaatataacatatcaactttccaaactaattcattataattcatcacattaagacaatgaggaagaaatatatttcaataaatgttttaaaagcagctgataaactacccaatcataatgaacaatttttacaaatagaaataaaaaatgtttattaacttgataaaggatagctacaaaataaattccacagtatacatcaggtttaaaggggaaatatagaaattattcttttaaatcgaaaacaagacgaagatactcttactgcttcatttcagcattgttcagggaatcctagacagtgcgatattgtaaaaaaaagaaaaagatatcagtattggagaaaaataaataaatctttcactatttacagatgatttgtaattgagtatgaagaaaatctattaaaagatgttcatttaaattatgaattaatatgtaaatttaacaaagtgggtagttaattaaaaatcagtgaaaatttaaaactcacttaaaaggtttagtaaaaattaattatatatctatataactgtcataactgtagaaaataaaagtttaagaatacactggttttatgtaaccagttatcgttaagggaaactgggtgaagagtacatgggaattttgtacaatgtttgaaactttctrtaaatataaaattacttcaaaaaacattttaataatgagtttatttcacacacacatttttgtatccccaccatttccgtgtctgaccactactatactatatcctatcataacattccatacatacttaaaaccaagcaaagggtggagttccatcttagaaaactgaacagacattttggacaacacattcttggcaatggaacctggacaacatttatcagatatggtatgtaaatttctcactctgcattacaaaaagacaggtggatatcaaatgatagagaaatgaaataagacagaaattttctaacaagctgtttaaactattaaggagacttcttgctccactgccagagatcttgaatagcctcttggtcagtcattaggaagcagttcttcacataattgatgaaattggtttccaatttgggaagagaaccacctttttgtgtacttgcttgcatttttgctttaatgttttctacagaactaggtccttttagcgttttgggagggttttttttctgttttttgaaggattcttgaccttttgggtcttgatgttgatggttttgagtctttttcagtctggtttgatttttgtgcaattttggctggagtatcttrtatagatttcttcactgrgctttttcttcatcttcctcacccttgtcatcgtcatcttcattgtcatcatcattatcttcattagcagcaagtttttactttttttctgtggaacctcactaccacctctagaggcagctcgctttccagatatacttaagagctttgcatcctcctcctcttcatcttctcactgtgcatcttcctccacagctgttaagtgctgcccattaatatgcactggccctgaactatgcttcaaccataagaccataggtggtggtatttcaaagcccacaaaggaaactgttggctgtacagacattttcaaagttgccagtgttacttttatttggactgcgtttatatttcattgcttctgcttcaacgatgtgcaattcatcataggtaccrgctcctgaactggccattcttaaagaaaactggtgctcattttcatcatcatccacattaaagtgataatatttgtcagctttagttcacaattaaaaagttaattttgaggccttagagggctcatgtccacgtccatcaaatcttctatgggtttgtggcacccactgtggtgggagagaaggcgaatggagataaatgactcctactccagagaacaaacacacaggacagaatcacaccaggattgaaaattttttaattaaattataaatatacgtattttatatatatagtgtaaatatatacacatacataatttacaaaagcattaaacaaaccaaatacctagaataaatctatctgaaaatatgaccctattcataaaattgtagaatatttttagagaagttaacaaacatctaaataaattatagaatacattatgttatggattagaggtctaggtattgagatgatcccagttctcctcaaattggattaaagattaatttcaatgcctttcaaaatttcattccattttattgtcattctattgctttttcttccgctcaattggaagcaaccttttctcctctaattattggcatggccattctgcctctacttgccctgggtctttgtttcttttgcatttccctgcatttctgatctatagaaatatctgcctgcatgtcaggaaaccttgccaatgcataggagaaaataattgtgtggaaattatgcaagagcagttcaccttagaaaacaaaatgagttatcactgctgttctaattcttcatcttaaaaccatatcctgattacagcaggaaaccaagaggaagaacccattttattttgtcttgttagctatggtgagcagaataaaggccacctcttcatgttattttttcgattaagtatttctccatttattcaacatttttaaaatgtctttcatatacagtctccatcttcgtctttaaatggctcacaacaaaatagagagtgggataaaaatgactttctactacataatgtatttagtaaataagaatatttgtgggggaaagggccataggaggggaagaaatttgctctagtggagaatttgaggagcacgcaatatttgcggtggtccttgaatgcttggtaaggttttaccaattcaaagaagaatgaaaaaaatagaattcagaggaaacagaatagataaaagtacagaaatattaaaatacttggcatatttgggaaacgtcaacacataacaaaaacgctaacaagtctatttaatagatcctttgcttgattgatgtatacatccatcctcacacacctgttacatttgcaaaggctctgtttagcttcttttatgttctgttctaagtcatgcaaataaaaaaaatcagtgagctgtttttcatagctcatcagtacagcgtaaattttaaaaatcttactcaacagcttctccaagaatatccctcgcctctttctatagatgaatcttaggcaactaaaatgatttttgacgatttaaatgatctgattctaaagaacctggaaattacttataagatgataatggccacaattttatggtgttttaaaatagctgcagtacttagaatgtatatggtatatgcaacttaacaaacatctgaatcatgccaatacattatcacaactttctgaaaatgatgtagaaaaataaatttccctgtcactgagcctgaaaatctgtgtaaagaattgctatgagtaatgcttgtgattaagctttagatacaattaagctggatgagagctttaagtgtcaagaggttgtgttaaaattatctagtgtatcttataactccatgataattaccattatttaacagaattgcttgacagaaatggcatgacgggtgtgtactatttcctacatttgcatctgcttcatctttctgtaacttttgcatgcaaaagttgtcttgtttgtataaattactccttatttatcttttaataatttccagtaatgctgattaatctccatcaccaatgtttttgctgtatctaatcacctaaattaaatacatagcaaaactttaccacatattcttattttctgctccaaatttataaaaaatgaatatttaatattattttattagttattaaattatgaataatgacaacactcataaatatttattaagtggatgcttcaatcagatgttgttagtgcctataattgtgagtgattaaataaatgtctagaaaagacaatccagttctgtggtcccgccatacaagattttaattttataaaaacagactctaaatgccacttgccttcttgccaacggagagaatattatccattgcatacctgccagagaaaaaataaagaacctacattgagaaatttctgaattcagctctgtctgtatgtatacactcaaaatgaaacaaattggggcaatttactgaaggttaaatcctctaaatgacattcaactaaaacatgcagggaaatggtttgggaggtttaaatgatcaatttaattgccttaattctctgaattgctttttaaaatagacacaacccttttgcatctaactgaagattctaaattgggggtttaggggtgtttgtattttactctcaatactctgaatcacrtatgctttctgtataacctgagtctttaaaatagcccagacctcagtgtgcaagagaccagaagttagatgttttacatatatgatctgcctatagctttctttccaggagccagcacctttcagtttgtcaggatttttaccccaaagtcacagggaagctttttgaagagctaaataagctgtcatcgctttgtgcttttgttcttaaatattggaacatagagtgtcatttcaagatattttattagtaaaatctacctgatttctattaaaaattattttctctaagctccaagaaaggagtgaaaaattatttataagcaaagtagccctctgaaccttgtctaatgcataagagttttccaagtaagcttcagtttatgattcagtagttcctctgagttaagagagtgttactagactaacatattcttgaagatacaatttgaaataccacattttaaaaaatgattttaacaagttttaagagtttatttcagaaccttgtactgccacagagcggtggtggtgatgtttttttttttttttcctctcaccaaactgtattgcaaataaaccttttgatgtttaaaagtttttctttggcagctaagaaaaacactctggaaagttatagttagtgaatttacccgtgtataaatatccctgagctagtctgttatcctgtggcatctggaataaaggtgctattgttgtagatttcatgattgaagaatagaataatcaattcagagggaccctgaggggaagattcactcacatatgtggtggaaactggtaatccctgtgtttttttaggttttcctacagatgaagagacatagatgagttcatgctttgatgcgtctagtgacatcgcttcccattcgtgccatattatagtttgatcaccagttcttatttgagatgattaaccttaatgtttctaggaaaactmcttttttgttaatccttttgttactattactttatttgctttttgggtcacaatagctggacaactattttatttgcaagggccctagccatgcgctttctgctgcaacatgccaaactaatcaccacagcattctgagggatgtgttatcagacttaggcctracagataggctctgtaaattatttaaarcttctcttcatttcttgcaaagcaatgcttgctgagcttctccatgaaaaattmgtgtaattccagaagattatgatagatttgcaaggtaggagtttggcctgtgcttacacacagacatctgcatagttatgaataaagtagaagttaaatgaaactgtacagttattttacatttggttatttgaacccyttctctactactttattcaatggcctttgaataaaagcagctgtgtctcatggctttctatcgtgaagtgttcaaatgtataaggtggttggatgtaaaaacactgtgaaagtatggataatagagtgcccactttctgtctattgcaacttccctgaggttttgtttgcagggcccagctgcatatacagacatgatggaatttggtttgtcaggaacctacaaaaattacacaaataactcagatttttaatgaataatgcacagacatgcacctgcttcagggacttcatagattagtcttgtgaccaatggaaaagccccttggaattcaattacatggatacaaaacagaaaataaaactggctacacttctagaactaatatcagcaaaatgttaactagttctcggagcaagcttttcctgaggattaggttgtttcagtttgctttgcttctgtgagacttactataaagtcataatattctgctcatactattatctactattcttgcagctggagccacttgcagaagatattctccaccaaagcccgaatatgaatgctgttatttctttacagaagatcattgaaattcaaagtatgtctttaaagttytcttaaaaattctaagcaggtaaaactaactaaaattatattgaaaattatagtacaaagaaacatttatttagagttatcataatttgcacatgcgttcttaagtatatatcttaatgtgttgctcttaatgcagcaatcttatcttacactgatgacaaaacgtagagactctagatttagaatcttgtttttctcatgtatttcaggtatttggagtttttaccattatgatcactaagcatttacccagaaccatgaaataaatgcagaaattgtgattttgtaatccaatcttaatgaagggtagttatctcctaawgatgttggaattcagcaatcatttactgattcatatgtgtcaagagaggaaaaaaaaattaatgagaaagcctctgtatgggaaaatccaacttaacaaagcagggttaagtcatagactttttttattatccaactcccttcacacacatacatacacataagcacacatgggtgcacacacatgctgaaatcaagcacaaactaacrtgaagattagcatgaagaggaaaaccaaagggcactattaggtgtccaggaggaacaggaaaacccttaggtttgctactgtcttgtagaagcatttattaagtgccacttaagaagccacttgccagctatctctttgggtcattgcctttgcttgttcagtagcaatttggagatatgggttgactggagttaaattacccatttatttgatactgtgaatatttacacatcaggccatataggaactaaaaataattctccacttcatctcactcatgctgtgactgagggctatatgtacccaataaacatttattgactacatgtcataactgaaataaactatgaattttgaagacttttagggaatagaaaaataaaccttcaaatgctggggtgcactattcaagtctctgatataagcctaaagtacaggaactgacagagacaaagcagcgaaggctggaggtgatttcataagcttaagaagaaaatcctgtcattgtcctgtctttgtcttgtttccattggggctagataaagagggtctattacatgtcattctagatttcaaagcaaggaatcttgtagtgatctttgacagcattcttctcttcatccacatgcaatccaatgtatgctttcaggtcattaatagaatgaaaatatctcagtttttatacatattattatctttttctgagcattgtttagccattatatacacagagtgttaaaattgattgttcctatgtatattctgagcatatcacttcaataggcatttttgagttcttattacatgttgatcaattaccaaggcacagaggttatgaagaggaataagacatagtttctgcatcaaggagctaacagtccaatgagtgagagacaaccaagtaaataattgcaatacagtattcacagagtacactgaggtcatagacaaggggcggtctgtttcttcagtccctttcaactgggggtgagagggactggatagtaaggaaggttgcttgacggtgatatagcctgagcttggttcttaagggctgaacagcatgttgaataactgaagaaagagtgaaaatgctttgaaaggaacgacagaagtgaaggactctatttccacataggtataaaaaggygtaatttctgtacatctttagaaactctactgttgccttttatattggatctaatttcctagtaatgattttccactgcatagttttttcctttcactactgatgttttcaagtgacctctacagtctgctctagccaagcaaacctgtttgactcttgaaaaagactcaatctactatcaaaacttgctgtaggagtatcctgccactaaggattgtcaattccactcttctgccccaaagtctattttacaccacccaacagtgatcacttgtctgtgaaatccatttccttctaaactcttaatgagtaccccacccagcttggagcattactgatgatccaataatgccataatttctcragaccaatatgtgttggttcagcggtatatttattttcgatgtttctcttaaaaatatcaaatatttaaatgtctgttagctctggttgctaaattagaggataatcatcaggaggacaggaatcatatctttttgtctctgaatgtccctccaggaagggttgacagcaggtgtgaggtgcttgggagcctggccattaaaagcaggcagatttgagtaggtaggacttgaataactcttcaagaccataaacaacaaaggccataagcaaccagagctcctccttctgagtcaaggatatatggtgtagtggacactgattttggtatacccagaaacaatgcactcttcacatctactcaaaaggagtctggttttattcatgaatctttgccaccagataccgtgcaactcagggggaagttcaacttagctccaactccaggggagctgtttttagtctaaggcagtcaacccacttgacagtgattggttaagaaatgggtacgtgactcaattcaggccaatgaaaatcaggactagcttcatgggcattcagcctgcatggtcacataggtcctacacatagaagggccccatccttagtgtaaggctcttggtgttgctgcctaaaattcttactgcgttttaaagaagcagcccatattttcatttggtaccaggccctataaattctgtagccagtcctgatgaaagtcaaggtgatggtgaggtgaaaaaacgtttaccaagaaggaatgatagtagcatcaccacaaggacaacttaaatgtcagttgagagggctctgaatagtgggttgaggttgtaaaaggaaagaaaacacaagatcggaaagcgatctctcaccatttgagaagtggagtgaaactcggtagagagaaagtgtttcagcactgtggctttgaccaccgtgtggtgcatttttatgtggttataactatgtgtcttaggggccactcttctatgctaaaggaagagaaaagagccctctaatgtccacagagcaataaaatcgagtgggtatttcagagtcttaaacttcataatggcttgggaaattaaaattatgggctccctgattagtaaacagtgcttgatttccttacaagatatgaaatcgcactcttgcttctcactgttttataaccaatgcttccatttcacctgctcctttgggactccaggaccctaattgtgttcctcgtttcccctttggcagagaaagtggtagggacaggttacttattttgtgagacccagttcaagatgaaactgtgtgaactcttccttgttaaaaaaattaataatttctggagggtaacagcaaagcactgaaccaagcatggggtctttctgagagtggggcgcttcgcaactgcacaggtaacccattatgaagctgcccctgaaggtagtccttgttcaacaggagcacttcctcttcacatacgtctctgagtgtcacacaagtgcctcctttcaactttagggggtgttcagatttcagcccaccttctagcccaggttctgaagggttcttttgtgctgcagtttgcaacgacagtatcagaaaactatgttactcttgagaagcaggcttgtagcatgtgggaaacattcaggcaagtctctagatagccttatcccaaggcacatggcaaggtgctgacagttctcctgtgaatttctttttgagaactgagtcccccagctgagggtatgcaggtgctggaggtgcgttggctccttgcctggccacatgtatgtgaatattttccaacaggatcatttatgttgtcctgtccttgtttatgttgctcatctagctgaagagaaaaggccttacaggccacagaagggcaatgatttmtcctgacaggtgaagacccttcctgacaggagagggtctggttccatcttaacatgatagatggcatgcaagggtcaactatctttgagatgacaaaatggaaaaaaagtttcatgttattccttaagaaattaaaaagagaactaccatatgattcagccatctcactttctgaagacttatcagaaagaatttaaattagaatctctaagagatgttagcactcccatgtactttgtggcactattcaccatagccaagagatgggagcaacctgagtgtccatcagtggatgagtgggcaaagaaaatgttgtatagacataaagtagaatattattcagacctacaaaaggaaattctgcaatacgtggcaacttagcacaatcttttgatggcagatattatttctgctgtgttcctgcttgtttttaattgccgtatcttttgcacagtctctggcatgtattaggtgctctgcaaatgtgtgttgaatgaatgaatcagctagtctgtcaatgtttgccacatttttcttctaagcctgcgttgatttttgtaactaacctcacatatttatactccttggcacactcatgcagaatgagggattaagaagaccaagcaaaatacatgagagtccatttcctctcctttcttcacaacccacaaggatgagtcatttctaagttaggaagaacatggattatttttgtgagttgccatttccacgggtaagcttggggtgacaattctcagagctggatctagcacttggctaactggctgtaataatcaacaagtgatgccagtaacgagtcagcccagagtgagataaataactctcatatggatgtttcctttcctgaaacccaccctagtgatttacagcatccatgcaccgttgaattcgttcacttttctgcatggcatggtgggcgccagagttctaaaacaccactctttataccagtgctggcccattataactttttcacagatttgggaggggaggaaccatgaagtgagtttcccataaaagtaaatttatttagtttgaaagactatcacyttaagttctaaaaacaaataatgaatgatattgatattaatctgtgaaaccccaaaacatgagaacaagtatagagccatagtttccttttatttatttaaatttcttagtgagaagagtattccttttaagtgtcaaccaattttgtagacttcttgaatgataataatcataaccatagcatcttttgttttgtggatcaaggaaacatatacatgcacaaggatttgaggattctttcacaattttgctgcaaccctgcagtggtttgcctctgataagttgaaaaacaccagtgtaggagattttaaaatgatacgaattccatcgtaatcttctcctccactccacaaccatgtgacaatgagcaagccacttgtttgaggaatttcaccaggaatgacatggcacatcactagaattgcttttccacgttggcgctactgtgacaacaaagtggcaaataggcagaagaatcctaaaagaacagtaagaattttctccctgtagccccactttcacttttccccactctagggattatcccttacttagtgaattgaggtctttttagaatttcttattatgccaaccaaggcaaaatggtggcacaggcaagaatgaggaatggacagtgcctgcaatttcaccatatgttcttgtcaaatgtgttttacataaatacaggagcaatttccatgtttcttgtwtataaaatttgtgagtatagctaatcctctgttgttttaaacacacacacacacacacacacacacacacacacasagtattatttagggcaatgagaagtgaatttataatcctcagaatttatccaacttttgaggacaatttgaaaatggacatgatttcctttgttgcaggggaatgttacaagtaactatgtaattgactaaagcataatcagttatctccatggttccataccagcaatgcacagagcacactctcacacattctagagtaataagaatgaaatcagattttccctgggagatgagaggcaagtatatttgacacctactccttgtcagaactgtgcttgatttatgttttgtatatgtgtttttgagtgagtgatgtcttgcttctcctcctcttcctctatgttattgttattctttactcttattcgtcctcctcttcctattattattactaatattattatatctgtagttctgggaactggtcttagaagtaacaactgatactagaaaagaacaaaggaatgctgattttgttgattttactttttattatatttccaatgggagataactcataggtaaaataaaatactaaataaacactgtcaatgtattagaatgaataatcaaaatatgtggtacctarttttcttggcgattaagagaactggttatgaattgaaggaaaaggctataaaagtaaaataagaccgtattttatgtaatgttaccgtaaagataacaaccattgtcttcttttatctgaaataccatcctctcccatcattataatatcctctaccgaccccagtacaaggagaaggggcatttacatcagataatccaggagaaaatccaaattgtttctaagctgaaaggaatttgtatacatctcttgttggggggtgggggaagttatccaatgttttgacctcatggggctatgtacacaactaaaagcgttgtttctccagattgcaacgtgtgctgcataaattatctcacagactttactagcttcttgactgcacaccaaaattctaactcaaactcagtttttcctctttctttttgtccccatctacttcattttgattttctgcctttttttcgtatgtctcttctcctctctcttccatttccatcctattgagatccaggggagaaggacaagaaggtattcccaatattggaaaggagcttttagctcatagccatttgaggttttatttccagcagggaagaagcatgataaagcctgcaaatcgaaagatcactgtgcttgctctgaagacaggagattagcagggcttatagtcaaatatgagctgtttaattcagaagtagaattggtataatatggtaattamctgacagggagaggattaataatgtctgggttttctggcttggaaaactgagatgatggtggtgatcagctcccacgataggaaattgtgaagaaagaaaagatttgaaaggaagtgaaaaatactagacttaagaaaaagacactttgctgatagaaagtcttaacaatttggggagaaggcagtatcctccggaatatacattttcactgtattgaagttacggaggaacattggatgaaattatttacacaatacaaaccctgtaagatgatagcaaataataaaataatgtaataataattgagtgcttacagtgtgtgaggtactattaaaaattaatttgtttaatcttctctaccctgtaaagtagttactattttcattcccattttatagtgaagtaaactgaggcacatcaaggttcattgtattccccaaggttacacagctaatgagtgggcaaaagcaagatcataaaccaagcagtctagatccagtcttccctcttagcctctaagttacactatgtcacaaataagttcattccttttgcaatttttgggttgagtttttcccatttcttcccaaagtgacatatttagacaaaatttaagttaagttaaaattaggaatttgggaagttctggctaattgagatttagccacagtcagttctggaagctcagtgccaaagtacaagaagccatggagctgtgcgtccacttttgagccccttataaacttgtaaaatacwtctaatcagaaaaaaatgcaaggattggcagaatttcaaatccctgccctgttgagtttaaagccctgactgttgtcaggtgggagctgctatttgtcatatattctttggctttagacagaggccttgacgttagagtcctgggccaggcagaccttcattgaagaaaagcagcgttaggcattttcccactattaaccctgccaaccctcgcttgtatcacagccaggtcagacttgtacacatggctttgtgaaagttgactttgaacttctaattaaccattctcttcaaatgttcaaagtctggttgttgtgttggtggcgccctaatactagaatgtatcagaataaaaaagaaaagtctgccatctgctatgagacacagttttggggggtattttttattccaactgcgtctgcaatttttttttcactcacacatctaccaagggaaaaccaattaaaccaagaaaataaaactatgcatgcttctaggactgaaaactctttgtggattatgaaagagtaggaatactttgtgatcacatactcaggtgttagcacccagatcaatctcacacatacacatgataccatgataccattcactgagactaggacgtactagaagaaagtcaggtttgagggaagatcgtttcctaagtatttacatatattatctctagtcctcacataattctgcaatacacagttctttcctcattttgttcatgaataacttgagacttatcaagtttaggtagcttgttcaagttccttctactggtaagaaggaaaactaagattttaatcctggtcttactgtgatgtcaaagcccactttgtttcgattaaaggatctatatgaccttcctgttcccactccatttcaaaaatgagaacaatgttctaccagattgcctcttcccaagtatagacactataacaggactctsctaaaatgtaatagagtttgcatgcattaaaacaatctattgaaatacattagtgggcttgctagaatgtcagcaaataggagaggggaaaaaacataagctgaaatttaataaggagcagtaagcaacacaaaaatggggaatatctctgaagcaaataatggcatcagtgctataatgcacaagaaatcttaagatccgcatcaaagggatatgaatttgatagatactaamgagttttgatctttgtccactcctgggttcaggaggaagccagtaaaattccttcctggaggaatgtatttctaatttagaccctcaatatatgcagagattaagcccaacaaaatatgaactcaaatacataaatacatacatatttaaataaatgaataaaatccaatgcacaataacacaaggcactagggagagttggcagaaatgagatatattagaataataagacttatttgtggagttaaaaatggagaaggaggattactttcaaataatgataatagataaagagtattcatttattttcacttcttcatggaaacccactaaaacaataacagagttttctttttttctaaagacataaactcctatggataaagaatgaaaaaggaaaccatctgttactgtcttagcagacctaaaaaaggtgaatcttaaagcaacactagcaagcgttatctctgacgggatggatacatcaggctattgtacccatatgtcatagaattgttgacttgcacacctaaggcactgttttattgtctagtttttaattcctcatttctcctcattcattgccctttcctgtcttcacttctttttccattcagcattaaaattataacattcatttgcccttctacgtttcaatctaccttaccaacaatcctgcccttcaactttacccatctaagaaaatctcaaccctggatatacaggacaaacaactttccctaacactggtcttccagagatttccccaatgcaggtcttcaagagattgtcatgatgtatagcagtttgacctcttagaaacttacaattaccaaacctaaatgggcccattaccattctactgctttctactcttgacccaacttaccttctttcagttcctctagtgtgctatttttccaccttcctcaagaccttcatatattttttcctgctattcctctttgactacttaactcctatacatacttcatatctcagcttaattgtcccttgatcagatatacaccttctgattatcagttaagatcagatttttttttaatttcatagaatgcagtacgttcattttagtagcttatttcactgtgagacatgtactcatagagcatgatcatttgattaatggcaacctgtaagatctatgaaagtatccacattcctgtatttccaatatcagaatgcttggtaggtaataaaatcgaaaagtaagagtatattactccattcacacactgttttaaacaactgcccaacactgggcaatttataaagaaaagagatttaattgactcagagttccatagggctgggaaggcctcaggaaacttgtaatcatgatggaagggaaagagacatatcttacatggtggcaggtgagagagagcaaatgtgtgaaggaggaactgtcagagacataaaaccatcagatctcctgagaactcactgactatcatgagaacagcatgggggacaccaccctcatgattcaatcacctcccaccaggtctctccttcaacctgtggggattatgaggattacaattcaagatgagatttgggtgggggcacaaagcctaaccatatcactgagtgatagaaacaatcctttgaatgcaatttggtttcccatgtagggaaattgagataaaatggactggtcatcctgacagtaatagtatagccctcataaaagctatacttctttggtgagttaacaaattagctttgcagtttattcataaatagcttctgattaatgcactcacagctccgtatccaagagactgactctttcccagaagatgagtattcatttcatctattaccccttaatctggcttcatgcttgctaagaaaactggaatatccatgtttgtctatgtacagggagataattcactattcatgttggcactattatttccaggacatgggatagtttattactcaataaaagttaattttcaaaaaaaggttggtttctaatgcaacattcaatgcattttagtaatatgtgtctcagggcttgaatatatcaaaacattgacagagaggacgcttgagatgtatgaaaggaacagttcctaccaggttttccttacgtctgttacatgttgggagattatcttggtttggcttctaccagaaacagatcctgatacacaaggagtcatgtacaagtaatttatttgcaggtgcaggcatagggagaaaaggaagaggaatagtgaagtgtgaygagaaaagaaatgaagtgtcatttgttcaactatccttgtaggtatctagagtttaattcctctggggaaattctgagagctgatgtaaaacacatagctcagagttatttcatgtgagctgcgagggagcagagaaatttatgctccaactccaaacagttattgcctgaatactgctcctgggggacaatatgaccctgacatttctggccaatcatagagcaaaaactctccaggggcactgaaagctgtcctgaaaagacatgctggttctggtgaatggaaatgaggttgtgtgcactcaattagtaaggggcgggacatgtggatgaggccctgacagtggctgctacaatgacggttctttcttgtcagccacagacagtcttggtttatgtctgttgtctcaacatctcatccagatactgtttgtttcagatttttcattctgaatgaagtattattatctatagttttattaagtgagtaaggatggatgtgttacacctgtactttgctttagcttctatcattgtttcctctggttgtatgagaaatgcgtggaaagtaaatataatttttactttgaacacatggttaaatctatacaaaatacaattgataacccatctctcttttcctggtccttttgtgatataactagcgcttcccttttaagaaaagcgtgtagggtcctcacgaataccagttgtaaatgacatttaaatttctgatctgggagktaaaggaagaaatactcaacattgctgccacttggcacaccagtcatggttgctgtagcttgtgacgtgcatgaagctaccaagctgttagaagatagagttaggggtcgggagccggtggctcacgcctgtaatcctagcactttgtgaggccgtggcaggcagatcatgaggtcaggagttcaagaccagcctgccaccatgatgaaaccctgtctctactaaaaaatacaaaaattagctgggcatggtgatgtgcacctgtaatcgcagctactcacgaggctgaggcaggagaattgcttgaacccgggaggcagaggttaccatgaatggagattgcaccaccgcgctccagcctgggtgacagagcgagactccgactcaaaaaaacaaacagaccaaaaaaaagatagagttaggggaaaatttgagaaatcagcagttaggtgtgaataaagtatgttcaggaaatagaaaggaccagccttccatacagcatttacactctcaatacttttgctacagagattttgtcaattattatacattgcaacttcactatgtgtatatttgttttatgttttgttacatattttaatttcgctatcaacattattagctgaaatgagctcacaaacaagtgtgaatgtgaattttaaaaatgagtgctctacttctgtctcccaagcgaattgataatgaatatgtaacttgaacaaaatgtttgtcgatattcattattcatcagggggacagagtaaaatcacagacgaacactgaagacacaatgctgttaaagaagcagcagtttctactttaaaatttagttattattgaccaaaacaaaacaaaaataaaaactaaaaccaaaaggaacaatttaagaagtgcagttgcagagggtgcatttatgtaacactccatgaagcattactttttatttagataaaatgactacgattaaaaattttgtaaatcaattttcagtttctggtattacttttaaaagttcaggagtgasgtaataattcttctttcttgactccattagtatcatttcttgctaatgatacagtgtccttaattgcttcaaacagaaaaatcactaaattctaatgattattctatatttttcattcaatttatggaatcaaagcaaaatttttgtaaataaagttgccccccccccmaaaaaaaaaaagcagggtgttattgtgaaagctatttgttataaattttggtaaaagtgtaacactgataataaaatcatttggttttgcattgatatacaaatctaaagttcggtggaacatcttatagagcaggaatgtactyagcattacgtatggagcacacaatttttataaatagcttaagatttaattatgaagttaatgacatttaataactcttaaaaacctaaacaagcttgatattctaccaatgaaaatctaagctactgtcaaaattttaaaactctttacataaacatagagtaaataaaatacactgttttagatatgtgacaggtgaggacagttaaaaaacaaaaaagaaacttcaggccgggcacagtggctcatgcctgtaatcccagcactttcggaggccgaggcgggcggatcacctggggttgggagtgtgagaccagcctgaccaacttggagaaacccggtctctactaaaaatacaaaattagccaggcgtggtggcatatgcccgtaatcccagcttctcgggaggccgaggcaagagaatcgcttgaacccgggaggcggaggatgcagagagccgagatcgcgccattgcactccagcctgagcaacaagagcaaaactccacctaaaaaagaaagaaagaaaaaagaaacttcagcaagacagttcaaaatttctctcttagcttccccttatcaaccatactttaggaatgtttgaacatctatagtaatattgaaccattttgcaaattagctttctgaatttttatatttttccaattagttagaaatcaaaaatattcaataagtggacctctgaccccatgtatgaaagagtaactgctatcgaagttgccctttgatcagaaacaagagaaaactatatacagatagagatagagagatatatgatacagagagagagaaaaagatatctaatgttccatacatatatggaacactgtctttctttcagacattggcctgcaggcaatgaagaaacaaaatgagtaccgcagattccagggtaactgactagaggaagtttccaggctgcagcatagagaagaagaacccaaatagggtccagtggtattactgagttgagaataaagccatcaaagttacagaatcactttatccctggacgcagtggctcacgcctgtaatcccagcactttgggaggccgaggcgggcggatcaggaggtcaggagatcgagaccatcctggctaacagggtgaaaccccgtctctactaaacatacaaaaaattagctgggcgtggtggcgggcgcctgtagtcccagctactcaggaggctgagccaggagaatggtgtgaacccgggaggcagagcttgcagtgagccgagatctcgccattgcactccagcctggacgacagagcgagcctccctctcaaaaaaaaaaaaaaaaaaaaaaaagaatcactttatcctctaaataaaggaggataaagtggctagaatttgtgaggcaaaatattggagatgaagttgccacacacacacacacacgtgcgcgcgtgcacagagtgctgcatgtacaggagtttccttaatgtttcatttgaataattttctttacatatataaggtgaaactccataaagctgaggaactaaccaacgaaaagtagcaggttaaacaattcaaggagttcacagaactgggaatagtttgcattagccggagtggagagatcttataatacacaaggcatcaaacagagacatcaaaatggtatcatcttagttataggactaaattagccttacattaaaggctacattttagccatcctaacacagtgtacaagtgagcctcaaaagtactttgctaattgtgagtaacttaacttcatgctaaaacaaagtccaatactctctcaaataatatgacaaaatccaatagccaaaaaatgttcaaattaccaatgtcaggcatccaaatgaaaattactaggcatgcaaaaatgtaggaaagggatcacaaggcaaatcaataaacagaaactgactcagaatgttaaaaatgtacttccaatatgaagaggaaagagtaaacataatgaagagataaattaaaaagataaaaaccatgcaaattgacattttagagaaaaaaaaatacagcatttgatatttttaaaagtccgaactttggatggattaatggcatattatgcagtacagaagaagaaaattagtgaagttgaagacatagcagcatctgaatttggtaaaattttgaagagtcaaaaacaacgaaaactttttgacatttaacttatttgtgttacataaaatgtttgccaaagtggagtatgctgaaaggagataaaagacagtaaccatgagacatttggaataaaatagttactcatttcagtattttaaaaattaaaagtgaagatattctgcttttagcagaaattgttctgagcttaccaggtagcaccatagttgtagagactatttctcaatgaaaaatattgcagtatcttgagaaggataaattaaaratgctaaaaatttcaaacttattaaccatacaattaagttttcaagattataggcaattctatcaaaaagcctaaagtatttagaccccgttgaaacaaaaaatayatttttcataagaatatcagtatattgtatcagtgagtgatagagctacaaaactgattaacatgtgtgatattcagcaggaataataattctgcttgtgttattttctaaggttcagataatcaatataaagaagaagctggtagctatgctttgacaaacatgaattatgcaatttttattttttgaaatgaattttagttgtaacaataaattttgaataggactattttataggccaactgataaaaataatttcttggccaacaaatatttccaaaacatataatttttatttttatccccatttagcctcaaaatagccccaatttagatgaaaaattacctggtcactcaatttatgcaccaattttcaatgtgtctttatttttgcatttaaacaatgttttgratcatgccaaagttctctatttaactaaaaaatttatcttaaaaacgtattaagttttagaaaatccatagacctccttgtaagccccaggtgttaataatttctgtggttgaaggagatagcaagaggttaagattagcagcagcttattttcctatgagaacccggtgtgtaaagatgaaaggcaacatcattcaaatggaaaaaaggtaaaaaaaagcaaatttgagaaggagtgacagctctaaggctccaaaatgatgatggaatgagggatttctggggtcaggaagttttcaaagtagcaaaggggtttgaattgagaaaacttttggtagataggtgacttgtgtaacacagattttcatgagtcaacaactgcctatttttccaaattgtccatttccaagaacaatctggtttatactgaagtctgtttacagagtacctgcaggatgccctctcctgggtcttgtgtaacccagtgaaaccccatctatggccctcacctctaactcttgactctctacattccattctatactttttatctttattgtagattcattatttgtgttacttttgccagaaaaaaacaaaaacacagaatggtgaaggctggatagtccttaaaaagtcctgaaaagtgggacaatttacatagtgggaaaaatgaataaggatagaggatatgactgaagagggagtgtgcatgtccaattttaatggaaaactcttctcttttgccagttgcatagccataggagagcaacccagttgtggctcattactaatatttgactttatgaataacagctcctgaaaaccctagcagtcaacctttgttcatttctcgtatgtgataatggtgatattattcctatgccaatagatatgactttcttgcacatctgtttctgtaatggaagaaaagaccctacacatcacatgaaaatataacccataaattatggggtttgaattgtctgcatattgcacagacggtgctgtacccacttccatttcaattattctcctctatgaatagagatagtcgtctataaatgcattattaatgtagaatatttcccttgtttttatagactttgccagaggccaaatataayttaaagttttgggttatttctgagtcaggaaactcatacatgtggataaaagccaaacttctaatatttaatcttaacttagcaggatattttatacacattcaattttatccaaaaaggtctcaactattttaaatccttcctagtactgacatacatatgggccaaaatttaaaggatcattgtcagtcattcttcttaaagactgctattaaccatgcataccttctgtcctgattgtgttatggaagtaaagatgtttgtttgtggcctagacctctcctgttgagaaataagacccaatgcttggtaattaaagcccttgcttattctaaatgtgcatattatgtgcaaagaatgtttgctgacctcttcaagagttcataggctcatagaaaagaaaaggttttctgccatagcaaatttattgtaacatccaagattgatatgtaacatgagatcagaaggaccacgataagtgagaatgagagcaggaataaaactttcatagcattaagcctaccactattatttataaatgtggaagttgtgctccattgtgatccagtgacttcttccggattagtgtgggatctccaagctggaaatacttttagttagctcaattttcgatgaacttctcttttttttttttttttttttttttttttggagatggagtcttgccctgtcacccagtctggagtgcagtggcacaatcttagctcactgcaagttgggcctcccgggttcaaaggattctcctgcctcagcctccggagtagccaggattataggcatgcaccaccacgcctggatattttttgtattttcagtagagacgggatttcaccgtgttggccaggctggtctcaaattcctgacctcaagtgatccacccccttcagcctcccaaagtgctgggattacaggcatgagccaccacacccagcctttgatgaggttcttattcatactcttcaattagccgtgtctccagttttatgatagcctcaataatttacctggtaaaaggtacttgcaatagtgcaattttatgagaaattaagagtagagtgaactagtttcaacatgattgtctcacactgtccaaataaaccacaaagtctagaaaatgtgtgtcaactgaatcacatatcttaaagtacaagggtaatgtatcatttccaaagattatttctttagtaagtaatytgcaatatacrtaattcttttaagctgagaattttataattgagctttttggtattttcatgtctactggaaggtgggtggaggacagcagagtgcagaggaagaggcaatttaaaattagtgctgagtaaggattttagctcytctgcctattagccatgtgatcttcaaaaacactaccagacattgcctaaatagttgtcaccagggttaaataaaattacaaattataaatgtagaaacacckagcacagtcttggcacatatttagttctcaataatgctagtttgtctttcctctagtctttataatttgacccataagccactagccacatgtagtgtgtttgtcagagtccccatgttagccaccatagaaaacaagaaaaggatgtcataaggcatcactagctttgtaaatgtcatctgctaaaataacgtttaataataatattttatgtaactcattacaatatatgtacttatagatggtatatggaattttcaacttgggtaatactacaataacattaacttgaaagtaagtttaatagtagcggacacccatgtcaacaggtcttgttgacatggaaagtgggtggtgagactgaatttcctcccctaatgtgacatctgttccttcgtgaaacagtaagataaagaaaggccaatcatgaaatattagagctggrtagtatttggcattgtgatctagcgaaactaggccctgggaatggaactgtcaattcagaaataactttcaaagttgagagatgtagggtaggccaaagatacattttcaacctcccaaatctctcttagtgtcttctcgtttcgattctgttacttcgttttggattagacatcatggtttcccacttggacttttgccaagatgtgaaattggtcttcctgcccccactgttatcaccttccaatccatcacccataatctctccaaagggatcttttaaaaacataagcctgattctataccttgtctgcctaaaatgccccctgatcatcctcaggttgaagtccaggatcatcagagtgtcattcaagagtgtgtattaattagcccttgcctaccatagcagtctcatcyatcccactccagactcttcctatgttctagtcattcccagcagttgacggtcacccagtaaaacacagagactccagtctctgtatatttgtatgtgctgtttccccttccagggatatcccatgacctcactctgctgaagatcaagaaaagatttggaaaggcaatcaagacatcaggatgatcaactattaggtttttaggagcacatttgcactctaatttctaatgatctttcaaatactcagtcaagtgttatttttcctggcaagtcttcccatacttttccatcatcttaaatacgtgttctacttattcccgttcaaggtcactgtgggcattttacacacagaattgtaattcttaactaacagggctgtctcaactggaccatgcatttcttggtgttagggaagcatytttgtgtcctcgacatgtggaaaagccttagcttctacaaaatgttagtttttggattcattgacagaattgttattgtttggttcaaattaaaaactttatgattctcrgactttggtcagaataagggatcacagcaagttaaatagtaatggacacctatgtcagatggtcttgttggcatggggaacagatggggagacttagtatcctctcctaatgtgacatctgttcctctatgaaacagtaagaaataaaggccactcataaaatgttagagctgcaagagacttgaggcatctccctatttcagagacagaaataaagtcctgaaaagcctcactaatgtcattgggatggcagtgctgggtccagaaccctgttatcttactgcccaatccagcgttcatccatttgccttttccactcaaacaaggctttttcttccaagaagtaagcaaacactgcataccaaagttcttgccaactagtcaggctgcagagatagtactaacctggtgagtcatgtcagcacctagggagattctcctgctttgatttggggctactcatcatttcacaaaaaaatagcctaagggctgcaagaaagccattaactatgctctttcatatttatcccattggcatgttctcatgaaatgaccttctattttcctctctttctcctttcctgcctcaaaaaaagaaacatcagtatgacatatggatgggctccaacatcagccagtayatatattaaagttttaagtcaattattgttctagtacacaccctgaggttgagaaagaaagaacatccaggactaacaaacctgattgttctggcaaagttgccattcaattcatgctggcatttctgggcttttctttttctttaatattccaacttcattttcttaaagttaatgattcaagtagcaatgtttaacagtacgattccattcatgttctctgtaagagtgctscctcctggtctcttgtgggtttcccagggagcgtgaagcccggagtttgcttacttagttgcagagacagctgtcagtctgagggtgagttcagtaggccatggattattcctcactttattgctgtgtaagcaagagggagactcagcttgggaatatgggcacttcacaacttggcattcttanattgagaaaaagacccaatcataacagttaagaaaccaaattacaactgtgtataacatggggaattttaacttmacaactgctctgagttggacgtatgtgagtattctgattattactgctgtaattacaattcttatgaagtatgatggatgtttttcctaggcaagtattggaagtcagtaaggatggtggctgtgccaaggggctgtgctctggctggtgctcagttgcaagaggagacrgagaccgtttctgccctggcctccctaacagtggatgtggaacagccctttgctcaggaagacagcaggtatgaatccaacgtgcgggaataatccgggtcagtcatatccaggctcatcgttgatatttgtgaatcttcctcctggctttccttcacctgtctcctccacttccaccacctgtcctctccaaagccacagatgccacagcacatgctttaggctatcgagaattcattgcttcattcttcatgtgaaatgcagagctggagcatgtggttgcagttcacagagaaatagaggggatgagatadatggtgagaaaaatcacgccttatcagataattgagtgcagatcgttatggaaagagctgcttgtgggcttaactccttttcctagttatctctgtttttccagatgttctttttctttctctaatcattttgaaattgctgatataacaaagagaaagaggagagtagaagatggaaataatgctagaccgttggatagccaaaatacatacacactccttacgtggctgtccttgaggtccaacaactggataaagggggaagttgcctgcaaaggagacaagagactgtgtgtaaaggactgtgtgaacttggggctgattttatttcattttgggatargacagaattggttttaatgtatcttcttatgaatatagatttctggagaaaaaatacagtgaaactaagatttgattcacttgttctctttttaaggaatgtttgtcagtttgtgcatttggtgttcatcattcagttctacagaaaatggtacattcagaatttctttgaagtctaccaaagccaccataaatgtacataaatattggtgatttctatggctgacttcaaggtcacatttcctcaatttaaaaataaatcaggtgaggctttactaaagctctgccagcttgcactcttaaattgctcctgagaaggaaatcagactccctccgtcaataacatcaccattaattacgcagatcctgctactagtgcacaggttggcaattttcccaagaatgcacaaatacgaacagttctactttcttgcttttactggatactcagagtttaatggatttaacatcttgttttggccaagaacaggagataaaatgaataagagattttatttttatgcaattattttctcttaccataaccacttaaacagcagattagcaataagggggaaaagttgtatattactctattgaaagataactttatatgaatatctagagcataagggaaaacttactttacatctttgataataagaactaaccccctgccgttcccagctaagaactgaaccaagttyataatccaaaggtgttgcaattattccgaaggccaaaaacagttagttgtctgtcatctgasagccataaaactgaggaaactaacatctgttagtgttggatataaaaggagcatagctattctttagaatttaatatagaaaaacgaagctaaattccaacctgagtgaaatgaattgtaaatatttttgcctgttaaattgcagagcttagaataattaacaataataagtgatgttatgagcctcaagtaatataaaaatctcagcagtttggcaggaattggccctgtaggcaaagttgtttatcctcaggtaaatagtgtgcttgactcatggtagtctatagagatttaaccttggcttcagtccacagtgatttttattttaagcttcatctgatggcagagagagaatgtgaatgttctgatgtgcaggaaagcagagtcaaagagtgtagcctggtttcatgttcatttatcacttttagacagattatatctattgtgattgatttttcttgtgggaagaaaaatagttttgcttgaaatatttctgatggctttgaactgaactccctttttcagcagaggaaaagaagaattcttctagaactggctcttgcatttcaattgaaccatgcatgaatttcctcagagacagacagacagacacacacacacacacacacacacacacacacacacacacacacacacacacacacagaaagagagagagagaatgctctgaaaagccacagagcatttactcttttcaggggaatactatcagtattgtccccctactcaaacaggaaagatggctttcaaaatgagataaagtggcggaaacgtttctgggcttttcttatgaatgcaatattataagcacacaggaaattgaaaaattagaaaaatcagagagctaaatggatggaaaagagtgaaggcaagattccttttataggaaattcttgccagttattttggagaacatattggtgtttggagtgagatgactcatttcatactaagattttgggtaaagcagctcttttcctggccaactcatatctgactcatttaccactagtgaataagggataaaatgctcctggctaagaaccattgtaagtattttttgttcgtttytcttggatgggggaggggatgacaacacagtgcagatagtcatttcgtttttataactacattgatgggccttgaagaataaattactaggaaaaggctgatatgtgggaattccttttggggatagttaattttcaaacataacacatacttttctgggggcaaaagacttgatcaaaaaaatgattgatgggtcaacaaaacaaaacaayacaaaaaatcttgaagggatccaagttatatagtcaaagaaaattaaatatatacgtctggtcacatatagcatactacttagaagcaagaagttttcttattgtttgctaggaatgtgtacctttaaacaattgtagtttgcatttgttgactatctgtttcaaaatgcttctactttggaaaggtcagtacagtactcaggtttactcttggatatcagttcaggctctgctgaagatcaagaaaagatttggaaaggcaatcaagacttcaagatgatcaactgttaggtttttaggagcacatttgcactctagaatgcctaacttggtgactttgtgtgtgtgtkktttttttttaactaacacaaaaaccaaacaaacttgaaagttagatttgcagttgtcattttgacctgtaaatcgtgttacatttttttttaacaaaatccagaatagttgtctctttaatcatttaactttcaacttttggcaacctttctcatgaacgtgatggtttcatgtcattagataatacagaaacatgagaaaacatattattcaaagtctgaccactttgttttttgggtaactatctagtttgtgaatataacagtgtaataatcagctaaatccaagtatcatctacctgagctttgaatggcttatcaatagttccaatgacatcaaaaaccccattttcctgaatcttaagatttatatagaaatayagaccattattaaatatacattcatatctaatgtacttagaaacatgattttcctcaaatagcccatcccaatgggattgtgtctccaaaggcttctagaagctaaatgttgcacaaattattcacccctcttattttattctatgataccattatgttaagtacttgtttaggtaactaagaacttatttagacaacttagataactaagtatgtgcgttaggctgttcttgcattgctattatataaatagctgcgaatgggtaatttataaagaaaagagatttaattagctcacagttccacaggactttcaggaagcaagttcctggcatctgcttggcttctccagaggcctcaggaagcttaaaatcatggaggaaggtgattggggagcgggtacatcacatggcaaaagcagaagcaaacaagagagagagtggaggggaaggtgccacacacttttaaacagccagatcccatgtgagctcagagcaagagcttacttatcaccatggagatggtgcaagccattcatgagggatctgcctccatgatccaaacacctctcatgaggccccacctcccacactggggattatatttcaaaatgagatttgggcaggaacatttatccaaactatattagcaggcaaatttttcaatataaattttgtttttaattttcatccagtgtcaacaaagccttagctgaaaaytgaggtgagatttggaagctcctggtaaaaagaaaaatctgccccctcttcatttatctttcctcctcttcccagggccatcattttatctctattttcccaacgtgtctaacatgtggtcttgaggtgcatgtgaagtctgacttagaacattagggatgttctaatcctccaatgcccagttatgtattttggggttcagttctgtrttatttacaaaacagtgtttactttgaaaaaagaaacaaaattgaatagaaacgtatataaaataagatgcataatttagcttcccatctcatctttttcttcactccttcaatcctatcctcttaccactacagaggaagagtagagcttgcctctagagtctccacacttcacagttgtttgctcaagggcaagttacttaatctctctgagtttaattttcctcatctttaaaatgagagaaaaatttcatagagttgtgagaatcaaatgaaacaacacatcacaagaacttaaaacaatacctggcatgtagtaaatacttgataaaacttgataaaggtttattatttttattatttttctatcacttttcttcttcctcgatttgttacactttttcttgttcttcttgttcttgttcttcttgttcttccttcttcctcttcttcttccttcttcttccttcttcttcttcttcttccttcttcttcttccttcttcttcttcttcttcctcttcttcttcttccttcttccttcttccttctcctccgtctcctycttcttcttttttttttgagatggagtctcactctgtcacccaggctagaatrcagtggtgtgatctcagctcactgcaacctccacctcccgggttcaagcaattctcttgcctcagcctctcgagtatctgggactacaggcacgtgccascatggccagctaattttttttgtatttttagtagagatggggttttaccgtgttagtcagatggtctcaatctcctgacctcatgatcagcccacttctgcctcccaaagtgctggaattacaggtgtgagccaccgtgcccggcctgtttcttcttttaatatattggccatcattcagtaatctataatataagaatatagagcctatacttgggcatctatacctttagctgttcataggttaaatcaatcaggactatcctccaaccagcagaatgaggaagaagaacatgtgaaaatatcaagttcattcactctttcaacactttctgattatttctaggagccagataaagtgttaggggccaggatcacaaagctgccttgtactcctcaaaacgttcacatacctttttacagcagcagtagaatactgcaaatttaatggcttaaaacacacaaagtttgtcrgtcagaaatctaactaacccaggtctcactgagctaaaagcaatgtattggcaaggctgccttcatttgtggaggctctggggaaaaaytggtttcyttgccttttccatcttctggaggttgcctgcattccttggctcatgaccccttcttccatctttaaagccagcaacttcacatctatctgacctttcttcagtcatcatatctctctctgccttcagctgagaaagggtttctgctattaagggctcatataattagattagactcaccaggataatttaggattaatttctccaccttatcacccctaactttaatcacaactacaaaatcacttttgccatgtaaggtaacatattcacacgttccaaggattaggaagtggatagctttggggactattattcttcctaccacagaaacaaacaygaacaatcaactataataaatgacaagtctttgataagattgaaatagggtcctgcaaaatgaaaaaaaaagcaaaacaaaacrccttataggccaaggactggggagcaaatcacagaaccagggagaagagaatcagggtggaagaatgtgtagatttcacacagtaaataggacaaaaggcattcaagatgtctttactttgacaagacaatttaagaagcccttactttacaagacaataacttgagacaatatatatatttttaacttctactgctgacactcagtccaaagtatcatcatctctcatccaaacttttacagtagtttccttactggttttcatatccagttttaccttctttctaatccattttatacacctcaatcaaaaacaaaacaaaacaactggaaagcatatctggtcatgcctctgcttgaaacccttcaatacttttccatttccattaacataaagatcatcatcttcaataggctccataaggtctgtattagtagactcatacctataattcctgccttacttctaacattcttcctctttcttttctgatgtggtttccaacaatgaccttaattaatttttaatggaggtatatcttacatataataacatgcacacgttctaagatttttaccaatgccaccctcatataaacaccacccagaacaagttcaagaacatttttattacctccaaaaagtttgcttctgccacttcccagtcggtgccactccctccagaggtaactaccgttttacttttaacaccgtcaattatgtttgcctgctcttgaatttcatttaaatggaatcatgcgtgtgtactgtatttcttaatctgacttatttcacctcattaagcatgtttttgagatctatttatgccattgacaatccggagtttcttcatttttattattgtacattactccagtgtattaatacaccctaatttgtttatccgtatacctacggatggatgtttggcttgcttacactttgagggctattatgaataaagctgatcaattaattattattgtggtttaaaaacacatgtaaaacttaccgtcttaaccatgttaagtgttcagtacagcagtgtttatatgtgtattgttgtgcaacaggtttctggaacttgatcttgcaaaatggaaaccttgtagccattgaccagctccttcatcttcccgcctcatccttccagcccctatcaaccatcattctgctttctgtttcagagtttgactactttagatacttcatataattggaaccatgcaacttttgtctttttctactggcttacttcacttagtgtaatgtccttaaggtttctccatgtggtaacatatgaaaacatttccttcttttttaaggctgaataatattccattgcatgtatatgccacattttctttatccactcacccactgatagattcttggattgcttccacctcttgactattgtgaatgaatgctgctgtgaacatggatgtgcaaataactctttaagttcctattttcagtttttttggatgatatatacccagaagtgatatttctggatcatatggaaattttatttttaatttcttgaggaatctaaatctctatgaaattttcatacaagttttctttttgtggtcacagcactcagtttttttggatagatagctaagatagctaaaattagaattgctgggttgtagggaagtcatatgttttacttcataaaaatcttccaaactgttttccaaagtggctgtaccatttttcattcccactagcaatgaatgacagttccaattgcatcatagcctcacctacacttggtaaaatcagtctttataattttagccttttattgtgggtgtggagtgatatttcattgtggattcagttttcctccaaaaagccatactcatgtccacatcagggcttccttggcacatgccttctcttctgtttggaatgtttatcctgtcctctaccttcttccaccaaccctttattggccttcccattcttttcatcatatcctgtagatttcagatcaaatatcacttcttcttcttgaaaaatattcaccgaccactaacccccaaattagatcaggtcctccatgctttctcatgtctcccttacacttctgcattactccacaggacataagtgaaaattagatacatttstgtgcttatttgattcctttatgttttctcctgtaagctccttatgaatagaatctgcatccstttggcttagcattatttttttaatagcagtatattacctgacacaaattaggtactcaagatcyattttggtagtaaaagacgagcaaaagttcagagagtatawgagtgcaaactttgggaaaggaaaggactctcggggcagttgggggtgccacagagttgagtaagctggctgggtagaaagggatcatggcacaaaatttaatggaagggaattaaaatatttattaccattcgaatttgagttaatcctgttttcagtattaagctttcacagagagagagagagataacttaggtctatacattgaacagagagtgtcatggaggaggggccagcatactactaaagggacagccaagaaacccttatggtaattgtggtaaagaagccaattaatcatggtagaggaaatggagaggaagaaaacctagtgtagataaattgttgagaaatagtgagtagttggcaattcatgaaatatcaatgaaatgggagagaaagaagtccaaattaatagtctggatgataatgccattagctgagagagaaaaaaggaagacgttggttgaaggtgactatgtattgtagaattaagaggcgaacatggacaaaaggaagcaataaggcaaactagggttgagtaatggtactgttagaaaatctatgtcaattccccacaaaaacttgctgccagttgtattgttatggtaggtgtgagtttgtgtgtgtgtgtatacatatgtttgcttttgttgggcttttatttctgcacagccttgtgatatgagggaatatattcccaatcacacatttaggtgtagaattgttacacaggaagtctgtactgagaatatttctggatctttattttttttwaattctttttctatttatttattattattatactttaagttttagggtacatgtgcacaatgtgcaggttagttacatatgtatacatgtgccatgctggtgcgctgcacccactaattcgtcatctagcattaggtatatctcccaatgctatccctacccccccaaccccacaacagaccccagagtgcgatgttccccttcctgtgtccatgtgttctcattgttcaattcscacctatgagtgagaatatgcggtgtttggttttttgttcttgcgatagtttactgagaatgatgttttccaatttcatccatgtccatacaaaggacatgaactcatcattttttatggctgcatggtattccatggtgcatatgtgccacattttcttaatccagtctatcattgttggacatttgrgttggttccaagtctttcctattgtgaatagtgccgcaataaacgtacgtgtgcgtgtgtctttakagcagcatgatttatagtcctttgggtatatacccagtaatgggatggctgggtcaaatggtatttctagttctagatccctgaggaatcgccacactgacttccacaatggttgaactagtttacagtcccaccaacagtgtaaaagtgttcctatttctccacatcctctccagcacctgttgtttcctgactttttagtgatcaccattctaactggtgtgagatggtatctcattgtggttttgatttgcatttctctgatggccagtgatggtgagcattttttcatgtgttttttggctgcataaatgtcttcttttgagaagtgtctgttcatgtccttygcccactttttsatggggttgtttgtttttttcttgtaaatttgtttgagttcattgtagattctggatattagccctttgtcagatgagtaggttgtgaaaattttctcccattttgtaggttgcctgttcactctgatggtagtttcttttgctgtgcagaagctctttagtttaattagatcccatttgtcaattttggcttttgttgccattgcttttggtgttttagacatgaagtccttgyccatgcctatgtcctgaatggtaatgcctaggttttcttctagggtttttatggttttaggtctaacgtttaagtctttaatccatcttgaattgatttttgtataaggtgtaaggaagggatccagtttcagctttctacatatggctagccagttttcccagcaccatttattaartagggaatcctttccccattgcttgtttttctcaggtttgtcaaagatcagatagttgtagatatgtggcattatttctgagggctctgttctgttccattgatctatatctctgttttggtaccagtaccatgctgttttggttactgtagccttgtagtatagtttgaagtcaggtagtgtgatgcctccagctttgttcttttggcttaggattgacttggcaatgcgggctcttttttggttccatatgaactttaaagtatttttttccaattctgtgaagaaagtcattggtagcttgatggggatggcattgaatctgtaaattaccttgggcagtatggccattttcagaagattgattcttcctacccatgagcatggaatattctcccatttgtttgtatcctcttttatttccttgagcagtggtttgtagttctccttgaagaggtccttcacatcccttgtaagttggattcctaggtattttattctctttgaagcaactgtgaatgggagttcactcatgatttggctgtttgtctgttgttggtgtataagaatgcttgtgatttttgtacattgattttgtatcctgagactttgctgaagttgcttatcagcttaaggagattttgggctgagagaatggggttttctagatatacaatcatgtcatctgcaaacagggacaatttgacttcctcttttcctaattgaataccctttatttccttctcctgcctaattgccctggccagaacttccaacactatgttgaagaggagtggtgagagagggcatccctggcttgtgccagtgttcaaagggaatgcttccagtttttgcccattcagtatgatattggctgtgggtttgtcatagatagctcttattaatttggaatacgtcccatcaatacctaatttattgggagtttttagcatgaaggttgttgaattttgtcagaggccttttctgcatctattgagattatcatgtggcttttgtctttggttctgtttatatgctggattacatttattgatttgcatatattgaaccagccttgcatcccaggaatgaagcccacttgatcatggtggataagctttttgatgtgctgctggatttggtttgccagtattttattgaggatttttgcatcaatgttcatcaaggctattggtctaaaattctcttttttggttgtgtctctgccaggctttggtatcaggatgatgctggcctcataaaatgagttagggaggattccctctttttctattgattggcatagtttcagaaggaatggtaccagttcctccttgtacctctggtagaattcggctgtgaatccatctggtcctggactctttttggttggtaagctattgattattgccacaatttcagctcctgttattggtctattcagagattcaacttcttcctggtttagtcttgggagagtgtatgtgtccaggaatttatccatttcttctagattttctagtttattggcgtagaggtgtttgtagtattctctgatggtagtttgtatttctgtgggatcggtggtgatatcctctttatcattttttatcgcatctatttgattcttctcccttttcttctttattagtcttgctagcggtctagcaattttgttgatcctttcaaaaaaccagctcctggattcattaattttttgaagggttttttgtgtctctattcagttctgctctgattttagttatttcttgccttctgctagcttttgaatgtgtttgctcttgcttttctagttcttttaattgtgatgttagggtgtcaattttggatctttcctgctttctcttgtgggcatttagtgctgtaaattttcctctacatactgctttgaatgcttcccagagattcgggtatgttgtgtctttgttctcgttggtttcaaagaacatctttatttctgccttcatttcgttatgtacccagtagtcattcaggagcaggttgttcagtttccatgtagttgagcggttttgagtgagcttcttaatcctgagttctagtttgattgcactgtggtctgagagatagtttgttataatttctgttcttttacatttgctgaggagagctttacttccaagtatgtggtcaattttggaataggtgtggtgtggtgctgaaaaaaatgtatattctgttgatttggggtggagagttctgtagatgtctatsaggtccgcttggtgcagagctgagttcaattcctgagtatccttgtttactttctgtctcattgatctgtctaatgttgacagtggggtgttaaagtctcccattattaatgtgtgggagtctaagtctctttgtaggtcactcaggacttgctttatgaatctgggtgcccctgtattgggtgcatatatatttaggatagttagctcttcttgttgaattgacccctttaccattatgtaatggccttctttgtctcttttgatctttgttggtttaaagtctcttttatcagagactaggattgcaacccctgcctttttttgttttccatttgcttggtagatcttcctccatccttttattttgagcctatgtgtgtctctgcacgtgagatgggtttcctgaatacggcacactgatgggtcttgactctctatccaatttgccagtctgtgtcttttaattggagcatttagtccatttacatttaaagttaatattgttatgtgtgaatttgatcctgtcattatgatgttagctggtgattttgctcgttcgttgatgcagtttcttcctagtctcgatggtctttacattttggcatgattttgcagtggctggtaccggttgttcctttccatgtttagcacttccttcaggagctcttttagggcaggcctggtggtgacaaaatctctcagcatttgcttgtctgtaaagtatttaatttctccttcacttatgaagcttagtttggctggatatgaaattctgggttgaaaattcttttctttaatattgacccccactgtcttctggcttgtagagtttctgccaagagatccgctcttagtctgatgggcttccctttgagggtaacccgacctttctctctggctgcccttaacattttttccttcatttcaactttggtgaatctgacaattatgtgtcttggagttgctcttcttgaggagtatctttgtggcgttctctgtatttcctgaatctgaatgttggcctgccttgctagattggggaagttctcctggataatatcctgcagagtgttttccaacttgattccattctccctgtcactttcaggtacaccaatcagacgtagatttggtcttttcacatagtcccatatttcttggaggctttgctcatttcttcttatgcttttttctctaaacttcccttctcgcttcatttcattgatttcatcttccattgctgataccctttcttccagttgatcgcatcggctcctgaggcttctgcattcttcacgtagttcttgagccttggttttcagctccatcagctcctttaagcacttctctgtgttggttattctagttatacattcttctaaatttttttcaaagttttcaacttctttgcctttcgtttgaatgtcctcccgtagctcagagtaatttgatcgtctgaagccttcttctctcagctcatcaaagtcattctccgtccagctttgttccattgctggtgaggaactgagttcctttggaggaggagaggcactctgcgttttagagtttccagtttttctgctctgttttttccccatctttgtggttttatctacttttggtctttgatgatggtgatgtacagatgggtttctggtgtggatgtcctttctgtttgttaggacagacagacaggaccctcagctgcaggtctgttggagtacctggccatgtgaggtgtcagtgtgcccctgctgaggggtgcctcccagttaggctgctcgtgggtcaggggtcagggacccacttgaggaggcagtctgcccgttttcagatctccagctgcgtgctgggagagccactgctctcttcaatgctgtcagacagggacatttaagtctgcagaggttactgctgtctttttgtttgtctgtgccctgcccccagaggtggagcctatagaggcaggcaggcctccttgagctgtggtgggctccacccagtttgagcttccaggctgctttgtttacctaagcaaggctgggcaatggcgggcgcccctcccccagcctggctgccrccttgcagtttgatctcagactgctgagctagcagtcagcgagattctgtgggcgtaggaccctccgagccatgtgcgggatataatctcctggtgygccrttttttaagcccgtaggaaaagcgcagtatttgggtgggagtgacctgattttccaggtgccgtctgtcacccctttgactaggaaagagaactccctggccccttgtgcttcccaagtgaggcaatgtctcgccctgcttgggctcgcgcatggagcgcgcacccactgacctgcgcccactgtctggcactccctagtgagatgaacccggtacctcagatggaaatgcagaaatcacccgtcttctgcgttgcccatgctgggagctgtagaccggagctgttcctattcggccatcttggctcctctcgatctttattcttttgttgcaaattcttattttgttcttgatttaaattatcatacttstaaagagcactgaaatcattccaacatatgtatataaacatttcaaaaagtatttatgggatgtctagtatgtatacaaaatggtataacattggagggggragatgaaaaagaaaaatgaatgaggaaatgaaagaacataaaacaaaattcacaaaatacgaactaatatatgaattagttatatataaaatcagtttgtgaatactggaaagataaagaagtcatcaggctgggcgcagtggctcaygcctgtaatcccagtgctttgggaggccaaggcgggcagatcacgaggtcagatctaraccatcctggctaacacggtgaaaccctgtctctactaaaaatacaaaaaattagccaggtgtggtggcaggcacctgtagtcccagccgctcaggaggctgaagcaggagaatggtgttaactcaggaggcggagcttgcagtgagcggagatcgtgccattgcactccagcctgggtgacagtgagagactccgtctcaaaagaaaaaaaaaaaaaagaagtcatcagtgagataaacagacttacttatgacacatacttatgaaagtcatttgattctctgtcttttactttagcttttgtggcttactaaaattcaaatctttgtccaaactgattagttatcaaataaatgcaaatttgaataacaagaaggtattgttttacatatattagatggtaaacattcaattagaatataaggtcaatggagaatgtgagttctatgagagcagggatgtttgtctattttgttcattgctatgttcctagtgcctagaacagaaccagggcacacagtacacagtcagcaactttttctagaatcaatgaaaaatatgagtaaactaagtattgctagcatgggtggagatgtggggctttagagcctcactgctttgggaagataaactatggcagccatgctgcatactaatttagtaccattttatatacacaaaatatatgacctggtaattttgctcttgggaatgtataccaaagacattctcagcataagtctttagagtacgtatactaggaagttcactacagctttattcatggtgaatagagagttggagtcaagcccagtgtccattattgggagaatgaatagttaaaatgtggtggatgcactgtatggagatgccaygtagaagttaccagcttcaaactagataaatataagtgcatgacagatctagtaaatacagtactgagtgagaaaattatgcacatgtgtataaagttaaaatttacataaaataaaaatatatacccacaaaacaataatacacagctttaaagaacacttgcaaacaaaataatgtaacaggcattgtattgcttgcctttcaggaggaagaggagtagaagtaagaaataagaattaaattaaatcagtaaaatgagaaaatgttttactacgtaacagtgttaatataaattaaacaaatgctrtttttaaaaccacaagaaataagatttaagagagaatacaagaatttaatttaatactacatcttgtctcaagtgaaattacttccttttttttttacttttgtaaattatcttatggctgttggagtgaattgatccttctttaggatatgaaatctttgattatcaatgacagaaaactatcagtgttcactgtgacattgacttgctggagggaagcttatgtctttcaattcgttaaaccattatactaaaatttatctttgctgggttgattttatagttatctcygaacttactgtcttcagctccctgcatgtctttccttcccccagcttgtgtctttgttaatcaaggtgaagtagacatgtatctagggatggctgaagtgggaagcccccagattttcagagcactgcttctcattcctccaaacacagccattaaagggwcatcactcaccagatatctttctaaatgttccataaagaaatcatcttttttaaaaatgtagacatataaaatagtgacctagggacagggattatatgaagataatgccacctctactgagagctagggatatgagaagagagatactataaattgtcccaatggcagatataaataatccagttattttacaattgtttcacacttcacagtgtataaatcatgttttcttacattaactcgtttcaattctcataaccgtgagggcaagtaagggattattatttctattttaaagataaaattgacaatctagagacactgactgactgattcaaagtcaaattttcgaaagtaaaacagctgggacttgaacccagaacatctaccttgaaatccaggatattttccaacttactatgctactaacacttctatgctgcaagacgctggggagaattgaggctagacatggtggcgtacccctgtagtcccagcattttggaaggctaaagcaggaggatctcttgagcccaggagttcaaaaccagcctgggcaacatagcaagaccccatctataattatttttttttaattagcccagcatggtggcacatgcctgtagtctcagctattcgggatactgaggtaggagaatggcttgagcccgggaggttgaggctgcagttagctgtgactatgccactgcactccagcctgggcaacagagtgagaccctgtctcaaaaatacataaataaatgaaagagcgagagagagaattggttaattatgcatatgtgtagatggttcaatagaaggtgggcagctataagtggtttattccaaaaaaaagaggtcaatataaaatgatttcaaagagaggaaaaggcagagaagcatctgatggaaagctttctattgtacctgcaagttgccctgtttcaaccaaagaggcttaatttttggcagtgagtgggttgcagtgtagacagcctactcacatcctttaagcctaggttggacatgtggagaattcacagatcctccaccacagagacatgtggattccttacatctgtgacctctgagacatttcccacacgtgactgtctctggaattccagccacactgaatcctggattcgggggaaaagattatcctgctgcagcttgagttagaaattggaaaaatcggtctccattagaatatccagtttgagttctataactgtattattcacatattctcagatgtaaataaggctatatatttatgtatgaattagtttcaaaacttaaatgtcttccttaatttaaaatctttcttctttgaatgctgattatttttgatagaaaagacttttctgaagtatgactcatttatcttatgtaccacctctaaactctctctcacaacctccttatcccagacactctaggacaggctataacttcttaagaagcaactttttaaatattccacacagactcttttagaattttcttttttggtaacaataaataatgaagacttaatgattatcattctttatttttaaaaggatgctttaaaaatttttgattaccctcctatggttaaaatctttcttttaatgttttagatttgttatacaaatgctaagctactactttatttgtcagcacctttagagatgcattgaaatcttggctttttttcttataaatctgtaaaataacatggccaaacatttcatttgtttgcataaacagctctggtttaaacatagcatgttttcctaatatgaaagtaattcattatagaatcctggcaagtaggtaaacattatgaagaagaaaatgaaaaccacccctctattattccgctacctagagagaagcatcatccaaatattttttccttctggtagcaaaggcataactctgcatttgtgtggcaacatgagtttatgcatgttagacagcaaagggacaaatctaaagtattaagtaatgtctcatagtgtttattatttacaggtcaattttacctcctttattttttaacctttgctaattttataaggaacatcattttgttcatggtttacacctgaaaccagagcttcacaaaagcgtatttaaatcagcagttgcaaaattaacaaatggcagagctcagacgcaaactcaattcacccggcatctcatatcccagtaatcttcccatgacaatccaactacctcatgtatttggattcctcctacaatttattcttttgagtaaattaaaagtcattctaaaagtttgccttaaagcaccctgaaagggttactaaattaaggttaaatctcaagtataaattttcaagcaattagttttggttttgcctgcrcagaataccctgcagatgatgccgaataaaaactatttacacactaccatagtgcatttcttgtaaaaatattgggtctgtagcaacaatttgctaatcaaattcagaatttgatttgaaatgcctccggcaggcagccaatccagttatgaaagaacagaagcaaaaaccagagccctagtgagtctcctccagaagctagctgggtcctttgctctcattagcaaactggttccataggaaatcactgcagttgctcctaaaataaaatatcatagttaattttttcaataaattattgaactgtactagacaccaaacatgtacattttggaatctagagttataaaatattctgacatgttttaatataaacaggaacatttccagtgattgcttggatcgaaaatgtttttccccttgacatttgtttatacttcctaggaaagaaattctatttatggataactgaataacacaaataaacatcagagagagctgaaaaatcagctttgattatgcatgaaaatctacaatgtcattgtgtactcttatgccgtattctgattgcctgtttatttttacagaactgckggtgagcctatggaagaggagccagccttgtgaagtgccaagtccccctctgatatttcctgtgtgtgacatcattgtgtatccccccaccccagtaccctcagacatgtcttgtctgctgcctgggtggcacagattcaatggaacataaacactgggcacaaaattytgaacagcagcttcacttgttctttggatggacttgaaagggcattaaagattccttaaacgtaaccgctgtgattctagagttacagtaaaccacgaytggaagaaactgcttccagcatgcttttaatatgctgggtgacccactcctagacaccaagtttgaactagaaacattcagtacagcactagatattgttaatttcagaagctatgacagccagtgaaattttgggcaaaacctgagacatagtcattcctgacattctgatcagctttttttggggtaatttgtttttcaaacagtcttaacttgtttacaagatttgcttttagctatgaacggatcgtaattccacccagaatgtaatgtttcttgtttgtttgttttgttttgttagggtttttttctcaactttaacacacagttcaactgttcctagtaaaagttcaagatggaggaactagcatgaggcttttttcagtatctcgaagtccaaatgccaaaggaacctcacacactgtttgtaatggtgcaatattttatatcacttttttttaaacatccccaacatctttgtgttctcacacacaggcaatttgcaatgttgcaattgtgttggagaatgaagtccccccacctcccagccacacacacatcctttgttctcatgacagtaggtctgagcaaatgttccaccaagcattttcagtgtctttgaaaagcacgtaacttttcaaaggtggtcttaatttgctgcatatctatcaaggacttattcactcacctttccttttctgccctctatcaattgatttcttcttacctttcatcattcattccttcctttagaaaaactgaagattacccataatctcctcttattacttgagggccttgactatttagtttatttygtttactttacaggttaacacagttgttttgtctgattgcattttattaactgtgaagccgttgaaatgaatatcacttaagcaacgttgctaaatttctatgtgtttgaaatgtgttaatgaaggcactgcttatttgtagtcaccttgaactgacttaacctagaagctgtgccttcttgtgaaaaaaaaaaaacaaaaacaaaaaacagcctttaaacaagtttccttagtgtcaaaagttaaaaataaaggacatttatttctgagataaaaagtaacttactaaatataagtaggttatcctcctwcctcctaaaattcgatttcaacatataactcaaacacctaaacatattgaggtagaatatctcacagtatttaatatctgacaatgcttttgaaagagttgatgtttctttttatatatttttctaactcaaaggatatattaaagccataagtgaagattgtcatgcttttattcagaaatctgaaagaaaccttaattaaaacaaggttttagggaaggccatgatatgaaagatatggaacaatatggttttagttagagaggactctaacctgtaaatcaaagatgaaagatttcactcaagtagaattatataactccctttgttatacagtcagaccatatttttcatgcatttggtttttttaggattaccattttaattttaaagacttttattacatatacaaaaatggctcaatacttggtttaacttcttagaaatttgagacaccctttgaaataggaaatctgaaatggaatgtaacttagtattaggtaaaaattgctttcattgcgtaagggcaaattcagtctagattcatagtagtaatcaattttttataaattttattttcatgagaaattcataccaatcatatttgctagcttatgttattttgcagtgattgcttgaggatatttacttaaaaaaatagtagagccaaaggcttaacaaaagactctcccccattttaaaaaggaaactcatgttttaattagaaaaataattgtgtagttttaaaatcaacttcataattataaatctctgtcattactttttagtcctcccagatatttttttagttgttgaataagaaaataaaacagtgtaatgcaaacatgctaatttactaaagtttcctacaacagtttagccacatgtttatgccaagccattaatctgataaagccaaatcactaggacatctccatggttatttagatttaaaacttgacacattaatgagttaatcacacatactcccatatgacaccatacccaattggttgcacttagagtctttaaaatacctggagaagcaaatgaactgtggagaggattatccacagcatgtagttgtaagaacagaatgccattgctttttgattataccattacaagatggagcatagccctgagggacagaatggaggctttccgaaaatatcaacacttcttttgaaatagaccagcactttttgaaagggtagtttcacttggtatagtttttcttcacttacccgtttaaattttattgctcgcagttgttctgaatgagaggctagaagagtattatcaattttgcatctccttgtgatacttactttgaaggaaaatcacatacgctctctcatggtctcatggtatctcatacagggtgaataaaaatgatttttgataaatctactagtaaataatactaggaatttaataagctgtcaaacgtaggtataaaaagaaggcttaaaaattaattttcccaattgtataatttggggctgtatattaaactaaaaaacacagacagttttattaaatagtaaccaaaatggactcaaataaaaccagaggctatgttaccattgcttagtaaatggaaagaacattgtgagatgaactgtctttaaatattgtaacaagtttataacatcaatagtggagacagaagtcagctttggagaaaatagagatatttatgaaaaaactactacaaatcacatttccattaccaatcctggggatggaaatattgccttcagtttttactccagccctatacgacactctcactaacctttcactgacaacatcatggccttgaaagcagggatctcctcccacaaaggcttcagaaattacaggactggtctctcttaatagtttagtcctgctttatttccaaagggcaattataaagcctcgtggatttactgggtttctttacagactccatatggaagtaaaatagaatgatcatttggaaagtctcctgggaaaaaattcctcttcaatcagcattttaaaacttttttatttttgagtcagagttttgctcttggtgcccaggctggagtgcaatggcgcaatctcgactcactgcaacctccgcctcccgggttcaagcaattctcctgacgagtagctgggcatgcgccaccacgtctggctaatttttgtatttttagtagagacggggtttctccatgttggtcaggctggtctcaaactcccgacctcaggtgatccgcccgcctcggcctcccaaagtgctgaaattacaggtgtgagccactgcacccggccaaacttattgttttaatcccagcatttatgtttagaagaattaatttaaatatttcttactatttctctgtcgaatgtttactctcatcttatctcaatgaaagaagtattaaaagtcttatggccccaaaagaaacaagccaaactgtactgtcttaaaagtgattcattctgagcttgaaacgactctgtcagtgtttgacattgtcatttctagtggcatgtatcttaacattcttttcctgcttcaggaatgaaatcacttgtcctgctgagaaaataaggggaaaacaagatagaagtaaaaaacaacacacctgttgaactattttcataaagatggcgttttcactttcaaaagaaatgaaaaccagatggtctatgctaagaagtgaaggcattttgttgtcttcagaactgatcaacatggtcatgatcatcatcaaatttcttgtttccaaaggccactattgtagtacagtctccagcaggattttgtaccatgtgctgcctttggaataaagtattataatgtatcttgtcaccttcatcaacaccaccattaaatatgtaagttcctatatgtgactttttctgggcatatttgcatcaaaaatcacagtccttgcctccttgcttgcttttactccatgaaacgcttcatgaagcagagcatgattgtcaagtgaccagaggatgacatttgtaagtgaacgtggtatactcacacatgctatactcatactacataacttagtttctccaaatcaactgcagtccgttttatctatgatattcctggcttcgtataatggttttgtaaaatacattaaatacaattaagtccgttattactatgctggaaataactaggtcagacaatgaaaccttagacttttgattggggctgtttggacttgatccaatgataaggtaataaggttgttgcaatttctcaaagcatcttaattctcaaactgaaacatttagcaaatacatggtgaatctggtgtaaacttacaatctaacaaataattttctttcaactcttctctttttctgcctaacaatctatacgaaattgccaatatctaagcaatcaaaagtttctgaaatctctgtttccttagtagaaatgaccttgacaacttattttctgagataccactaggcctactgtctttcatgccattttatataaacattttgatagatactctgtcttttgttttttatctcttctcttttcaagagtcacttgactttttcaaatattcttaaaagatagatttagttattgtattttggtctacaattttggacttggcagtttgttttactaatgcagaattattctttttgtttcaaacatagtttgccatcatctggctactacctaatcatgttgtactagttattgtggaaagaaaattgtacatacatttccttgtcctttgggagatgtctttgagtcaaacccacaagcatgaactctcacctgaaagaaaactggaaaaggagaaactttaaatcagtatgttttgaaaggaagagatttccagactttttaaagcaaattggaatcgttttatttttttgtttgggccttaggcacaatagaagcaaatgttgcaatattaaatataatagggagagttcactgtttcctgggacattgtggtcatgtccttaatccttcattgtgatgccccttcttggagttggcattttgtgacaattcatagagatcttgcagcaatatttggctattggttttattaacttaaaattcaacagaaatggagtaattaaaaaaaaaaacaaaaaacagagaagaattgcaaaatctgaagtggaatggcacttccttgggtatgtaagggttgtttttagataaaactcccgatttgttcttcctacactttaatagtctcaaattctttctggggaagcaacgtcagtgtctacctccacagtaactatgatataggaaattgtcctttcagtggtttctaggtataacaaacaagccgttaaaaatgagtgaccattttgtaggttacagcctcagcaatctgtgtcatttgaaagcaaatatcctgatatttttaaataaggtgagcagggcaggcaggaaaccaatatttagtacttttgtgattaaacattctagaccaggcttgttgatatgtatgccaatagcctagaatttttggcttagtgtaaaataaaaatgtcttttctattgtggtctgatatccgtttctgtaataagatcagtttgttgtcctctgtgcaccagtggttttgcccttaattttttttggctagcatcaccaagatctgtcatccagagctgctgagaaaaatacatgttgccaaacttttcttaaaattgtgctgccagtggtattttcccagatgtgaaaaataataatctaa

SEQ ID NO: 94571 - DNA, 19221 bp, Homo sapiens
  misc_feature (1)...(19221): n = A,T,C or G
ctcccaaagtgttgggattgcaggtgtgagccaccatgcccagccagggttctcttaaatgtaatggaaagaggagaattggaaaggcagagagagagaactaggatcctgcatgaatgaatcaagttgagttggagagaaactgtatttataggaaagttaaggctctgagtttggaggccaagcagggtggggatgagcaaagccatgagaaggaaagaagggcttcaaaaaacagctgctccttcttgatagatgcagagaggaatcaggaaagaccgggggccatgcagtgttatttgtagcacttgaatagcttggctcttagagttccaagacctccagctagtgatccagagatgccattagagggcaaaagcgctcgctgctccctcatttgtcaccaggaagacatggtatggccctggtcttaaggacaaattagtcaattgcttattgtatatcacgagatgaacgctgggagagaggaaacgcagggtgtgtaggaagagggcaaaaccggctacatctgacccaccccagagatgaggaaggcttccaggtgggaggtgacgccaggaggtaaccaggtggaaatcaccgtcaagtagcagggacaggagtgcaaaggctcagagggaacttctccaggatcagcagagctcaattgtagggtgtgaggctgtcacagaggctggagaaataagcagtgccttgctaagaagtctgaattttaacctgaagggacatgagagctactgcaggctggtaagcaggggggtgatgctggttggattgcaatgcagagaaaccctgggttggcctgcgtctgatggactggagacacccttgaagaaatcagggtacaggcagtcctccggagtagaaatgaggaaggtgccagctgagaccacagcagtggggaagagtgtgagagggatggaaattgagatgaattcatgggtgtttggcctgtgcagtcacacagtgccccatgctgagagggaccccgagcgtggcttaatgctctgctcttactgtcttaaaattcctcctcattttatgtttgaatctatgttttgttttgttttgagaaagagtctcgctctgacatccaggctggagtgcactggcgccatctcagctcactgcaacctccacctcccaggctcaattgattctcctgcctcagcctcccaagtagctgggactacagccacctgccaccacacctggctaatttttgtatttttagtagagagtgggtttcaccatattggccaggctggtcttgaactcctgacctcaagtgatccgcccacctcagcctcccaaagtgctgggattacaggcatgagccaccgtgtctggccttttttcttgtttttaatggcactccgagagtttgcatcttctaccacacaaacaaagcccagtccagagacagcgtctattcctgtaaagacctagatgcagctcccccagggctgccagcatccatctcacttgccagtgacgttaagagctttcccaccagggaatgtgcctggcagttgtgggcagtctctgtttctcttgctggcagacagaacagttcttctttttttgagacattgttccactcttgttgcccaggccggagtccaatggcatcatctcggctcaccgcaacatccgcctcctgggtacaagcaagtcttctgcttcagctgggattataggcaagcaccaccaygccccggtaattttgtatttttagtagagatggggtttctccatgttggtcaggctggtctcaaactcccaacctcaggtgatccacccacctctgccacttagaaaacaataaacaaatggggtaaaatggtagcactggggaatgtcagtgaagggtataaaggatgtctttgtactattcttgcagcgcttctgtgtctggaaaaataataataaatattacatatttaataactaaatgaatgaaaaagtgtgcaatgtttttgcagatgtcaaccttggcaatgcaataggatcatctcagaagctctgcatgaatatcagtgcccaggctccaacccagagattcatagtcagttagctgggggtgaaactccagacatcggcatgtgtgaaacacaccccaaggtcattctagtgtgaatccagaataataagcagccagcttagcctttagtgtcattgggtgacaggaaagttctaggctggggactttctgagccccccatgtctgcttgttttgagatctgatcttgggggcagcatggtgactcaaaacaggagcacagttgtgggtccagtcttggtccttccactaataagatgggagacgttgggtcagatcccttgcctgtgccaagcctgggttttctcagctgtagaatgaggttaaccaggaagtgcctcagaggccaatgtgcattcaaggaagaagatgcccagctcagtaactgatatggtgtggctgtgtccccacccaaatctctaattatagttcccataatcaccacatgttgtgcgagggacctagtgggaggtaactaaatcatggtgtgggtctttcccctgctgttctcatgacattgaataagtctcacaagatctaattctttttttctttttttgagaccgagtctcactctgttgcccaggctggagtgcagtggcgtcatctcagctcactgcaacctccgcctcctggatttaagcaattttcttgcctcagcctcccgagaatctgggacaacaggcatgagccatcactcctggctaatttttgtatttttatgagagatggggtttcatcatgttggccaggctggtctcaaactcctgatctcgggtgatccacccaccttggcttcccaaagtgctgtgattagagatttgagtcactgtgccctgcctgatctaatggttttataaaggggagctcgcctgcacaactctcttgcctgctgccatgtaagatgtgactttgctcctcctccaccttctgccataatcatgaggcctccccagtcatgtggatctgagtccattaaacctctttttctttataaattacccagtctcaggtatgtctttattagcagagtgagaatggactaatacagtaatccttacacccccggaccccaaaatggagttgccacaagatggcagtctgaaatccttgtgatgtccagctggcagaaaggaatttggatgagtagggctggccaacttctggtattgctggtgggtcctgtcattgtgtgggtgactccttgcacccctggcccttcataggactgaaatctgggagggttcttgggaaaggggctagagaaagcaagaggacaccaattttcttccaggcagtaggaaggcaagctggagaggccaagctcccaagtaaactgaggcacctccactggcccctttgtgaggcamgcttgacctgggttttatggaaagaaagtgccctcaccaaagggtgctaaacaaggccccaggctccacacttgatcccatgtgcccccctctgccctgccctagactcacctaaagctgtactgcccagagtcatggcctcaggccacacgtggctactgggcacttgagatgtggccatctcaattgagatatgctgttagtgtaaaatatacactagatttccaagccgtcatgagcaaaaaaaaaaaaaaagaacataaaatatctcattaagaatttttaagtattcattaatgttgaaataaaaacattttgaatatattggttaaataaagtttactaggagaattcatttcaccccttttactttttctaatgtggtgactaaattatttaatattacacatgtggattacattatatttctattggacagctctgttctaaagtctgcacgttgtccttttgtggcttatttccttgataattttattaaaattaaattgacgggcaaggtgcagtgactcacacctgtaatctcagcattttgggaggccaaggcaggtggatcacctgaggtcaggagttcgagaccagcctggccaacatggtgaaatcctgtctctacttaaaaatacaaaaattagtggggcgtaggggggcatgactataatcccagctacgcggaggctgaggtaggagaatcgcctgaatcctggaggcagaagtagcagtaagccgagatcacgccactgcactccagcctgggggacaagagcgaaaatccatctctaaataaataaataaataaatagaaaaacaaaattgagggccaggcacggtggctcatgcctgtaatcccagcactttgggaagccaaggcaggagggtgacttgaggtcagaagttcgagaccagcctggccaacgtggtgaaatcccatctctactaaaaatacaaaaattagctgggctttgtggtgggtgcctgaaattccagctattccggaggctgaggcaggagaatcacttgaacccaggaggcgaggttgcagtgagctgagattgcacaaaggcgctccagcctgggcgacagagtgagaccctgtctcaaaaaataaagaaagaaataaaaataaattgaggaaggattgagcatgcaaaatagaatcagcctttgaccctgaataccctgcagtgagaattcccctgtggttctcaggcttctgtcattccagcaaatacactcttccctcagcttcactaaaatgcagatattgtgagataatgctcatttctcacagcttgcttgaataataacaatgatcattatagtaatttataacttaatagtcaacattgcctttttaacccagtctgtgagactgaatcgtaaacgtgacattctttaaagctgtcaattaatataccagactgcataaactctaataacttacctttccatggaaagagaatatgtgggtattctctttgaagacaaatggttgagagtagactctcatccaagaccctctggcagtaatgagttgcattccagaaggttccagaaagttctgtggaaggctgcagtttgggattggttctcaggtgtctgtctaactgctttctaaggatgaagacggccgggcacggtggctcacgcctataatcccagcactttgggaggccaagacgggcggatcacgaggtcaggagatcgagaccatccttgttaacacggtgaaacctcgtctctactaaaaatacaaaaaattagccggcgtggtggtgagcacctgtagtcccagctactccagaggctgaggaaggagaatggcatgaacccgggaggcggggcttgcagtgagccgagatcgcgccactgcactccagcctgggtgacagagcgagactccgtctcaaaagaaaaaaaaaaaaggatgaaaactcctggttcgtgctttagcaacatccacaggagcaacagactaagacattcctccacacactaacagaccccggcagtgcagagccacgtgggtcttatctgtcctgttgtccacagtctggttttatcttagacctggcctggtgcaatccatgctgcgtataggcacgccacttaagtttcctgtttgtaaaaagcccctttcattcagtgattcctcagggctttaggggaactttctggaaaccaggaagaaggaaataaaggttgttttactgaggatgggtgacattgggtgcgggacccaaatgagtggtttgagcagaaagtagcctccacgctggactaatgcttggcaacattatgggaaaatttgaggaagccgggagaggagggggcagagtttctttcccagccagccacgggggccaggcagttttggtcctaggatgtctctatgcattcccaagtgattgcaaggcttcttcttgtcatcgtctgagacttggattccccaagcgtccttcttttcctggagtctctgagtcctctattcctgaggcctttcttcagccctcccaatagccctgccatgatttcattgcagggctgtgaccgtctatgacaagccggcatctttctttaaagggacacctctggacctgcagcacaggctcttcatgaagctgggcggcatgcactctccgttcagggcccggtaggcctcccatcctcagctgctttctctcctgctcaccactgccctggcctctccccttctcactgcagacctgggaacacactcatccaggggttggcayactaaggcaaccggccagtctcctgctttkgtaagtcaagtttcattgggacacaacacactcattgccttctgagttgtctacagccgcctttgagctacaatagcagaatcgtgttttgcaacagagaacccgtggcctgcaaagcctgaagtatttactctctggccctttaagaaacgtttgtggacccctgtgctgtcttactctcctgccagtgggttcccaggcctgtggcaggatctgtggacctgtgggtcccctggggtgtctcacggggctaaggagggacctttgtgcagatccacacaccctaaggtgtgcccctgggtaagctgsggtggtgtgggagggcgtccctgcaccctcatattgagtccaggggatgataagacagtaagtcccacggagaaaaggaatgagtcagtcttgtttgctgttgtaaccttagcacccagcaacaatattagagaaaggaagcccaggcctcgatggcaggggtggcctggtgctgctgatgtggccgggcacccsaacctttgggagcctgcaggccttgccatggcaggagaagcctgtcctgggtcctgggcctgctctgtggcctctcacaggcttttttcctgctctttcagtttagaacctgaggaaccagccacggagccgtcggccttcatggagcgggatgctgggagygggctggtgatgtgtctctgcgagtggccagccctgctggtcagcagcacaggctggacaggtctgcacgacccctggaacacttgggcttggtgtgacgggcacctggccaatctgtattctcctcacccctgccagtcctgcatgcccccacccygccacagtctcaatgagaaggggagggcgtgtgagctggaagaggggtgtctagaaacaggcccctgacattcaattctcttctcatagaggacgaagacttctccatcctgctggcagctttagaaagtaggggtgtagctgtggtgaggagctctgggcttgtcgggggccactgagctgtgagctgcttgcctggcctgcagcatgttcctgtcccgggccactgggtggggcagcctggggacagcggaggtggtggaggtgggcygccctgaatccccagttgggtcattgagtgaccaggccctcaggctgaaatgcctcctccaggagagtatctcacagaggctggtggcctccccacaagagcagtgctctttctccaactgaccaggtgactctggctattgtttatttaaaactttttttctgaatgggcatggtggctcacacctgtaatcctagaactctgggaggctgaggcaggcagatcacctgagttcaggagtttgaggccaacatggcaaaacctgtctctactaaaaatacaaaaattagctgggtatggtggtgggcgcctgtaatcccagctacttgggaggctgatgcatgagaattacttgaacccaggaggcagaggttgcagtgagctgagatcatgccactgcattccagcctgggtgacagagcaagagtctgtcagaaaaacaaacaaaaaaagaaattctatcagaaattccatgtagaattgtttctttttttaaacacagagtttgagcaactgactcttgatggacacaaccttccttctctcgtctgtataacaggtaccgcctgggaccctgggtgtctgtttgattgggggatggtggagggggaggggcacgcagcctttaccctgtgcttcccacgatcttgtctccttaatcttcactgcagctctctgcatagggtcttatactgcttgacgtgggggaaactgtggctcagaggatttcacagcagggcagggagcccagattagaatctgtagataccaagctttctactttttcagtagtttccaagcatctttttgttgttgttgttacatcattagtgtctttttttctttttttttttttttttgagacagagtctctgtcgcccaggctggggtgcagtggtgtgatcttggctcactgcaacctccgcctctcacattcaagcaattctcatgccttagcctcccgagtagctgggactacaggggcccaccacacccagctaacttttgtatttttagtagaaacaggtttcaccatgttggccaggctggtcttgaactcctgacctcaggtgatccacccaccttggcctcccaatatgctcgaattataggcacgaaccactgtgcctggccatgtcattggtgccttaaccaagcctcttttaatttttcaaacggaagagcccctgtgccacagttactgctgctgagccctttcaaggtgactcagtgaggagggagaaaagcggaagtggtgtgggaagaggcggggtctgggccagctgctggtcctgctctcctccctcctctggcctctaggctcccaggagtggtttggagcccgcgccatgtgctctggaggctgtggcagggcagggggagtcctcgtgtcccctgtgcacaacacagacaaaaggctgggtccacccagtggggggtcgggtgccaggccggtgcttaccccgccatgtttgcagcccgaggccagctggctgcaagtgcagggctgtgcgtcaggggtcagggtgcacacacccctgcgggtctcggggctcctgggatgcttcccgaagggcccggatggggcctgactggagctgccgaggggtggagcttctgggaaagggatccctcctagcggggagtgtcttgggcctggggccacttggtagggtcagagacgggtccatggcagtatctgctcttctctgtgaaggcaaagggcctctgacggagtattacagctgcctcatccaccagaagcatttccagcacatccaggtcwgcaccccttggctggaggccgaggactagcccctgcttctaggtgagaggccagcaggaggctcagggaggaggcggggccttaagcagggggaacagaggtgggcgggatgtactttttctgaaaaggtggctctggaggccacttggggacaggacctgggctctggctgaactcccgggaggaggctacttcctggtgtgccagcccctccctgccaggtggccccagaggccctttaccaaggggtttgaggaggccatgtcctttcagcctgccacgccctccattcagtcctcttccttcctgcaggagggctgggcctggggttggggcactgttgcccaggtgtgggagggcagtggctttgggaggtacagggacgakgtgtcaaacagcgtcgcttctcccagtgagatggttctcctttgcctccgtctctttccccgattgatttttccaaatggggagtcgtggcttggtcctgatgcgtctctagagctgcatcttccagcttcaagtgagcagagcagttggaggctgagggccttttcctggcaggactctccagctagtctttgttttagacagtctcgctccgttgcctaggctggagtgcacgatctcagttcatgcaacctctgcatcctgggttcaagcgattctcccacctcagcctcctgagtagattacgggattacaggagcccgccacaacacctggcttatttttgtatttttagtagaaacagggtttcaccatgttggccaggctggtcttgaactcctgacctcaagtgatcctcccgccttggcccccctaaatgctgggattccaggcgtgacccatcacgcctggccccagctagtcttcagaaatataagctgtttcgctttgttttcacactgacagctggtttgtggtgggtgtgctgtggtttattattattactgwtattattattattattattttgagacagagtttcgctcttgtagcccaggctggagtgcaatggcacgatcttggctcactgcaacctctgccttccagggttcaagcgattatcctgcctcagcctcctgagtagctgggattacagacagctgccacgatgcttcgctaattttgtattttttttagtagagatggggtttcaccatgttggccagcctggtcttgaactcctgacctcaggtgatctgcccgccttgggctcccaaaatgctgggattacatgcgggaggtgaacctgggaggtggaggttgcagtgagctgagattgtgccactgcactccagcctgggtgacagagtgagactgtctcaaaacaaaacaaaacaaaatgacaacaaaaaaaaaacaaattgtggttaagtagaaaaagtgtcaacttacattttcagatgtcccagccaggccgtgtggctgcttggccggcttaagccacttgtgcttggtgctgtcgggtgccttatccgattttcactcccctcaggggatgttgcctcactgtgctgggaggatttgtgttcccagggcagagaccagtgctctgaccgcacccctcttgcctagcagggtcggtggacctgggtgtctgtctgcacacgttctccagtggcctggacctgcccatgaaggtggtggacatgttcgggtgctatttgcctgcgtgtgccgtgaacttcaagtggtaggagcagaacccgaatctttctagggatagcttcacagatccaccgctgagggggaagcagtgcagagggagctgcccacagtgaggccctgcccctcggtcagtccagcacacactggaggccacgaggaggagccctgcggttactgtggctgggctgagcctcactgaagtagttgcttccatttagagctcatgttatatttaggctggtacaaaagtaatcacggtttttgccattaaagatggcaattacttttgcaccaacctaatatgaaaaaaaagcatcttaaatactagaactccactcggggcttttgctcctrgagtagaattggcgggaattgcctgcaggcttacatggtcttctttgtttctttctctcccaccatgtcccttttggccaagctcacgtggtgggtttgaatcagttgaatgagtgtcatgctgtggcctcactccacccagcatagacgggtgtttggaagggcactgttagaggagattctagaagcagtagccccagcacaagctgagcccttggcccctgctcaggagccggctcatggatgggattcagsgatgtgagcccctcctgtgagctgagctcagggaatgtcgggatcaaatctggtgccctagaaaagtcatcttttatgtgctgagccagtccccagggtgttccctttacttgttccatggccatggaattaagaaaaacatgcaaaaataattcttcagtccttgaagagcatccagcacagaaggtacaaaccccccttaaggctccctcctcaaatcggtttggccacttagatgtgcacccccccaggcctttatacccttcagatgccaaatctaagaaygagctcccggaaaccacaccccctgttccaacccccagcctggcttgagcatggggttgggggggtggagcccaggtgggcaccccaggggtctggtgtcttctccaggcagctctcaggctcccttggttctctctgcagtttaaatgagctggtgaaacatgaagaaaatggcctggtctttgaggactcagaggaactggcagctcagctgcaggtagccacatctgccaccacgccagggtggggagggttctggagactggctccgagccacgctccctgatcccttcttcccacagccagggtgggaccatgtagggtctggcggaaaagctagggagagagcagaggtcacaggccggcccactctgctgtcccgttttggtacagtaggctcaggaaagttaggacacacccccacctgccctctggatttatggagctgacactccacaaatgatgctggagccgggtgggccaggctgcagtttaggaagtgatcaggatcacgtaggtgggcgggcaaagggagcttctgggaccagccttgaaagatgggtggaattctgcaaaggttacttgtttcttattgctaaaagtaatacaccattcttgccaacagaatgattggcaggattttcagtaaaggtccaggtcggaagtcatttagactgggtcccccagtctctgtcagaaccatggtactgacatgtggtgtgaaagtagccacagatcatctgtcgattaaggggtgtggctctgttcaaataaaactttatttacaaacacaggctgtgggctggatttggcctgcaggctgtagtttgtgatccttgattcagacagtttagcaaggctgcaaagaacacagacacccccttgttacccacagatgggtgggacatggccagaggccaaaaggagggtgcttgcaggggaacatacagcatgtagaggccgggaggtactccagggcaccaagtgtgggaaagtgggacacacggggaagtttccagaaagcgtgatgtcaagttggaggcagagcgctgctggggtgtgaagagtctcgagtccaagtgagggagttaagaacttgggaggggttgttgttgggttggggacatggggtcagccaggtggtgacctgggatggggtggggacaggaaatgagttaagctctgctctttatttttttgcagatgcttttctcaaactttcctgatcctgcaggcaagctaaaccagttccggaagaacctgcggtaatcgcagcagctcggatgggatgagagctgggtgcagactgtgctccctttggttatggacacataactcctgggccagaggctaaaaccccrggacccctgctgtccttcccgcagcttcttctcggagtctcagggcaaaccctttcgagcagcrcctcccagtggccagaaggtgaaatgatggcagtggtgccgcctggtgaatgaattggttctgtgacccgggaagctgtgcttggctctgatttcttttctggaggctcagaaacacttcctctcttcttctgttcttcatgccccatgcccctgctagcgtattactgttctgtgacttctgcagtactcctcatcctgcgtttggtctccaggtgtcatctttctgccgtgttcctaacattttgattcctgtcttgaaaaaagcacctgctgcaccgtaagcccagggatgtggcagctgcagcgggcttggctttgtgaagaaccgagtgtgtccacggatgtggcagctgcagcgggcttggctttgtgaggaaccgagtgtgtccagggatgtggcagctgcagcgggcttggctttgtggggaacagagtgtgtccacgttgggggaacatcatacttgatacacactttttatttgcacaaagaaaatgctgtttttggagccagagttttcatgtctgattgatggcgattttcttcagaaccagaactgctggcagaaagggagcacccacacgcttagatagctgatgtcttattagagggcagtttgtggttcctgatttggaaattaacattctccaaacattccagtccaatgaaagttttatctgctttcccatataaaaactcttcccacaagagtgacttgattctcacaatcccgttggagtcgtgtgtgaatcctacagtgtgaggttcagcattgccatctccaagtgctcttcgtagggaaatagtttctggtcatgacgaggttccacttcccatctgatcctggcctgcctggaaacagaggacatgtgtttcaggatggcagagtttggggacaggacatgagcgtattgtgtggggctgctaggacaggcctggcggggtcggggggtgtccaagtcagtttacttggttcacaggttcccaggcccacccaggtgcctagaattggcctccaggatgggaccagaaatctggttttgcatagaaatggctagcagcaggcaccgtgccgctgtccagtctctgcccgcgtctgccccagcacttggcacagcgggacagacgcagagatctgaacccacatctacctggctgctcagtcaacccactctccacaaagcttagaaagcagccaggcacagtggctcacgcctgtaatcccaacactttgggaggccaaggcaggtggatcacttgagatcaggagttcgagaccagcctggccaacatggtgaaaccccatctatacaaaaatacaaaaattaggcaggcacgatggcaggtgcctgtaatcccagctacttgggaggctgaggcaggagaattgcttgaacccaggaggcggagtttgcagtgagctgagattgtgccactgcactcgagcctgagtgacagagtgagactccatctcaaaaaataaaaaaaaatcacacacacacacacacacacacacacacacagcttagaaggggctggtgttctcataagcacagatatctgaagagctgttagccagaatgattcttttttttttttttttttttgagatacgatcttgttctgtcacccaggctggagtgcagtggcacagtcattgctcactacagcctcgactcctgggctctagcaatcctcccacttcctgagtagctgggatgacaggtgagtgccaccatgctagtaatttttttattttgtagagatggggtcctgaatgcatggcctcaagtgatgctcctgcctcagcctcttttattattattttttagacagagttttactctgttcccaaggctggagtgcagtggtgcaatctcagctcactgcaatgcatcccaggttcaagtgattctcctgtctcagtctcccgagtagctgggattataggcgtgcaccgccaaacctggctaatttttgtgtttttagtagagatggggtttcaccgtgttggccaggctggtcttgaactcttgacctcaagtgatccgctcacgtcagcctcccaaagcctcagcctctaacagtgttgggattacaggcgtgagacactgtgacccgggatgattttcaatcacagttttttgttacgagtggaaaatgcgtatttataaaaatgaagtattacagacatgaacgtgtagaagtctctataatcctgtcatccaaggatggcacctgttaacgtgtatatcagggatatccaatcttttggtctccctgcaccacattggaagaagaagaatcgccttgggccacacacaaaatacactaatgctagcaatagctgatgagctaaaagaaaaaaaaaatcacaaaaaaacctcgtactgttttaagaaagtttacagatttgtgttgggccgcaggttggacgagcctgctatatatatattctaggttttcccctataggtatacttatgtgaaaatgattattgtgataattttattttgagatgaagtcttgctatgttgctcaagggggccacaaactcctgggcttaagccatcctcccgcctcagcctcctgagtagttgggaatataggtactcataactatgtgtggggtgattattattatttttaaaacaaaaatggggcctgggtgcagtagctcatgcctgtaatcctaacactttggggaggctgaggcagcagnnnnnnnnnnnnnnnnnnnnttgaacctgggaggtgggaggttgcagtgggccgagatggcaccactgcactccagcctgggcaatacaaagccagactctgtctcaaaaaaaaaaaaaaaaaaaaaaggtggattggggcttatactatgtgtgctgcttggcactctttttttcacttcaaagatattgcaggtattttttcacataagtatctgaagaaagacttccttttttttttttttttttttttttttgcatttttgagacagggtcttgctctgttgcccagcctagagtgcagtcgtgagatcagggctcactgcagcctccacctcctgggctcaagccatcctcccacctcagcctcccaagtagttgcgcaaccatgcccgactagtttctgtacgttttgtggagatggggtcccactatgttttccaggtaggtcttgaactcctggtgtcaagaagtccccctgccttagcctcctaaagtgctgggatgacaggcccgagcctcgcacccggccagcctcctgtgcgaggttgtgcgggactctgtcgtggaacccagtgtgtcttcgtgtgctggcttgtttgttggctctgtagttaacgggctgccccacgtggacaggcattggacccgtgtctctctgtgcaggcagaggctgctgcacgtgcatctgtgaacatggctgccaagaggggctgtgctcagggggagctggggcagaggctggtggcaatggggggcttgggtgtagtgtggaggcacgagagccaggtggccgggctacagtctgtgggagcttgggggttgcttgtcctctgtgtgtcccagtgtctttgtcggtgagatgggacaatgatagcacactctcacaggtgctgggggctgacaaatgtcaggtctgaggacagtggctggcccactacggggccagttcccctactctatagtcaccctgctcgtcttccatcaactgggtgctcaggacagtggcatggtggatccgcctgtacagcctgtgctccagcgtcctgcaggccacagcggtgtccagccctgaccatgactgcccctcccgccacctccattttatagatgaggaaaccgaggcccaagggcttagggaatcttgctctgaagcacacagtagggctgctgggctcagatcctccctccctgtgctgagctgccctcctcctgccgcaagtcccccacgccatgagcccaccctgctcaccggcctctgccctagttccccgcatggtgtgggagtgtggggcttcctagcttttaccctgccctcagttctttcacttccactggagtcccgcagggacagctccgggaccatgcaggcccgggtgggcgtgggggctcagctagctcggtggtgaacagctggcacgtctcttggttgcggacggtaagggccacatagacttgaggagcccgttggtgctcccggtaggcagccagcctccgcaggaccccgaccagcgacacagtggcttctgggcaatacggcacgtctacggtgaaagcttcagattactgaaggggaccagcggacagttccaggtcatgctgacctcagcagaagggcgaggccagagaggcagcggtcatatgagactagtagatgccatttgaccatttgggccattagatggaaaggcaattacttgggtgaaaaaggagaacccttagtagagaaagctgcaaaagaccgaagcaaaagaaaaaatctccagactcactggtgttccttaaaaaacgagctctggttctcggcctatctagagggctgtgaatgacacaaagcctgaccctgccatgaacttcttgtttcaggcgtctgccgatttgtctgctggcttgcaggggtgtgcctgtgtccctggccactgctggacctgtggttttcagggctgggaccaaggaccacaggcagagctctgttcgacccgagaggagactgagtgtgctggcaggggcgaggggttttcggtggcccagccaaacaccaccttctctcaagggccctgtcctcatcccagaagtggttgttttcctcctgtggtctctgaaagacacaggcatggctctgggacagagccatgtggtgatgactgtaatgggagtatgcctgtctccaaaaagagggctgtggctgtaaggtcaccttaagaggcacccctgtcctttgatgtcaccctggaggcccagagtaactcttctggaagccccatcatgtccatgcccaacagcgtccatcgttcccttttcccagagcccagagctgggtagagctgcaaggacaccgcctgcacagggtgcccggggctgggcattacctgctgcagtgacaacatctggctggatggcagagagctgacggactgtcgcgacatcccagtccagctgggccactgtcaccctggggttgtctaagttggcagagatgtctgcctctaatgagaggccattgagaaggatattccctcggagcttcttgaggacccggctgtgacagtcgctgaagatatatgcccgggggaggcacatcttgcagatggccaggcctgtgaggccggcgccactgccaagctctaggacagtcctggcgggaggaaaggggaccatgtctgcgactgcaccagggtaagcctgcctcggtgccctgccatgcaccccgaggtcacctatgagagaaggctgccgggttctcaatggcccattctgcaaggtagagggcagcatctcatgtgaccaggcctgtgatgccgtgggagatgatggctgtgctctcagagagtgtgactgagcctcccgagggctgcaccaagagagggcgagagagtcagtccagcgatcagaaggcaagtggcttagaagacaagtagccatccaccacatggctgaataaaccatgacaggaccaatcgccactcagcaatgagaagcaactaactgttgacatgccaacagcttgcacgggcctcaagggtgtcatgtggcatgaaagacactcatctcaggccacacaggattccattcattgaacattcctgagacaacggaattctggtgatagagcacaggtcagtggtggccaggggccgggtgtggctatgaaggggtggctgccttgtgatgattcaatatgctatgtttttcctttgtggttttctgtatctatgttttatcttattttttttgagctctgttccccaggctggagtcagtggcacaatcttggctcactgcaacctctgcctcctgggttcaagcaattctcctgcctcagccgcccaagtaggtgcaactacaggcatgtgccaccatgtctggctcatttttcta

SEQ ID NO: 94572 - DNA, 32110 bp, Homo sapiens
  misc_feature (1)...(32110): n = A,T,C or G
tggtttaattagtgagtcaattttctgtctccagtacattggcacacccaaaccttaaagatatgtcacactcattacctagctggaaatcaagacaactgtaggacaaaactaagctgacagtcactagaaaagtgatgatgtctgatcaccagtgacacctcattttccagaccacattctcctacctaggggtacaaatgggatagagtgagacgagggagcaaatagctttacctggcatgtgagatagcaagcataaggaaacaatgatagattaaaactatactcttaccagccattgtgaaagcaaggcagcagacttcatttttctaacgaggtggctccaagaatgcctcatcctagctctctgcgtgttttctaaacataagcagcagaataacaaacagaacaatgaaccagaaaagccttctttttttttaaattttattactatgatactttaagttttagggtacatgtgcacaacatgcaggcttgttacatttgtatacatggggcactgagtagttctatatgatgagtgagagttggtgggaagaatctcgctttttgtattttggcaagaatttgctaatttgaatacatttttccctgacctcaaccatcctgcagaaccatattattcccctgcgtagacgaggaggctggctcagatggtttttggtaacttgcccagtcatcagctagggtgcggcatggccaatgacccctgtgtcaaatctcatgaggaaaatatctccatgggtcatatggcatgctgagtccagttcagaaatgaacccttattattcctgggtggaatttgtgaagaatttcagtctgagatagtggtttagagcaaaaccagtcaggtagaaggcttcttggaaaactggagagcaaatggagctgtgtggcagcaaggcatgagacaagggtgtttcctagattagatggttccagaggccctgaatgagaaataccacatcctgccagcaccacctctcctaaaggtgaagactgagagggcaagaaccagtcagccattggcatccgttgggtagctggctgtgactcctaagtgttttgtataaatatctcatggcctgtatcttttctgtaaacatggatatgcctgtgaagcctctgggcagctggaatcctgtgggaatcctccacttccttggaggctagccattgactgtgaggactaagctctgacgtttttttttatcttgccaattcttatctaaggggtctggggagtcatgccctataaacaatgaattctcatgagatgggttttatttaaccctatatatcgtgacttactttccaacctgactctggcataacattacgagacagggaagaaaataaaaatattttatcccaaaacatgtttctttgccatatcttgaaatggccctgcaaagctgtcctttgtgggggaaatttgcatctgtaaaaaatctctattaacatagctagagctttttcttccaggctctcccaattttaaagagattaactggccgggcacggtggctcacgcctgcaatcccagcactttgggaggccgaggcaggtggatcacaaggtcaggagatcgagaccatcctggctaacatggtgaaaccctgtccctactgaaaatacaaaaattagctgggtgtggtggcgggcgcctgtagtcccagctactcgggaggctgaggcaggagaatggcatgaacctgggaggcggagctttcagtgagccgagatcgcgccactgcactccagcctgggtgagagtgtgagactccatctcaaaaaaaaaaaaaaaaaaaagagattaactaagtgtctagcaccttttattaaagatctgaataggaaacatttgtcatctattgtctctaagggcagccactataagacttcaaataccctgggtctccacaatcttttatcttaacctggacatttcctttctatcaatccaggtctttagacaaactcaaccaattgtaaaccagaaaatgtctaaatttacctatagccttgaaccctgccccctaccccgctttgagttgtcctgcctttctggaccaaaccaatgtatttcttaaatgtatttgattgctgtctcatgcattcctaaaacatataaaaccaagctgcaccctgaccgccttgggcacgtgtcctcagaacctcctgagggccgtttgctgtgtcacgggccatggtcattcacatttggcttaggataaatctcttcaaatattttacagagtttgactctctttgttgactactaggaccagcaacctgggaaagtgatggctcatcagactggactcagctgccaggggagtgggcctgccactgtgagcctatctgagctgggggtgggtcaggggactgagtagctctatatgatgagtgagagttggcgggaagaatctcactttttgtattttggcaagaatttgaaatctcaggggtctgagtcatgctgtagtctcaccacaggcctcaggggagtcaacttctgacctggaggcctggtctgggtttgtggtgtctgagtcatagttcgtgtgataaaagtacgtgctctggtgtggaaagcaggcagaggctttttcactccattctgtctcactgacaatgaaaatgctagctgtgacccaccacatgggtttcatgacccacgaatggaccaggcagctgtttagaaaacactgcggctcaatttctgccctctctgaggggtgttctagaaatctgtatggctgctggattggaaagaaaagagcaattgcatgaggaattgggaagtgaggacaaacagagaagaagcctcagctactatctctaaaatattatctgagaaagaaaacaaacaaacaaacaacaaacacatttcttttcctgaggaaggtgagcctttaaattatcaggcccagagaacatttagaacagaacagcagtcatggctcacttccccttcagctaagtggttacctcttgaagccacttgctatgtggctgtagaataactgaggccaattagccataagatgccatccaccctatagttcaacactgtgtgggcaatcactaaccaatgttatttctgtaaaccaatgaggattcctgacaactctgcaatcgccccatctcctgagttgttcttttttctttaaaaacttgagcctcctttttgttcttggagcactccccatggcaacttagaagtgtgtcctgggctacagtcctcaacctgggcacaaataaactctctatgttaattttgtctcatctttcttttaggtagacacattagctttgggagaatttcaaagagtttgaagttacttagatttgggaaacctgaagggcagtggtgtgtcactatctggtgtggcctggccttcagcctctcagccccttccctccccacctctcagagctcagggccaactgcatctctgaaagagcccaaagaccttgttgaggagcagggggatcctggctgagcctgcaagccctgggtctcttccagactttcctgcctctagcagctgctgctctaggtggccattggtgggctgcatttgctctctgcttgcaaacattgatgacacaggtattttgggtgtggtttagtagtggcccgacacaattttgtttccagtttgtcacactgacaaggttttaacctgacaaatgttaaacacaaattataggaggccattgttttagactaagctcttgcactaggccccaaaagacaagactaaaaataaaaataaagtcacccatgctaacgtttcaggtcaccaaacttactggaaaggcgtcctgatcctgagccctagagaaagttcttggatctcctacaagaaagaatttggggtgagtccacagagaacagtaaaaggaagtttattaagaaaggaagggaataaaagagtggctactccataggcagagcatccccaagggctgctggtgggtattttttatgattactcttgaatatgtgctaagcaaggggtggattattcctgagttttccaagaaaggggtgagttatttggttattcccccttcccttttacaagggaacccttaatcctaagggttgtagagtcaggaaatatgtcagcaggagtcgactcagagactcttcatcttgaataggagctgggtaaaatgaggctgagatctgctggagtgcattcccaggaggttaggcatccttagtcacaggatgaaatagaaggttggcaggtggtatcacaagatacaggttacaaagaccttgctgatgaaacaggatgcagtaaagaagccagccaaaactggccaaaacctgccaaaaaccagcaaggtgaggaaaactacctctggtcttcctcattgctcattattcgctaattacaatgcattctcatgctaaacgacactcctaccagcaccatgacagtttataaataccatggcaacatttagaagttaccctatatgttctaaaaggaagaattcctagaaaactcatgaataatccacccttatttagtatatgatcaagaaataaccataaaaatagccaaccagcagccctagaggctgccctgcccatggaattgccattcttttattcctttactttctcaataagcttgcttctttcactttactctgtggactcaccctggccccgaattctttcttgcacaagatccaagaacattctcttggggtctggattgggacccttttccggtaacaaaactaaaactaagttgttaatctaccttcagagagagagaatagcaacttcctaaccaggccagtttcagtcttcagtctgaggcagcaaaatagggtctggaggcagggaacataaggccgattcacactttagctatgacaggaaatagcctctgcgtaggccaagtaaatgactttgtaactttgcatcatccctttcatttacatagtgtgtgccccaagcggaggacattgaaactccccaaaattctggaatggggcctttgagcccctacgctcaggcccgctcccacactgtggagtgtactttcatttaccttttttttttgagatggcgtctcactgtgtcaccaaggctggaatgcagtggcatgatctcagctcactgcaacctctgccacccaggttcaagtggttctcctgcctcagcctcccaagtagctggaattacaggcacctgccactgtgaccggctaggtttttttttttgttttttttttttttttacttttagtagagacggggtttcaccatcttggttaggctggtcttgaactcctgactttgtaatccacccgcctcggcctcccaaagtgctgggattacaggtgtgagccactgcgcctggccgtactttcattttcaataaaacccttaattccttccttgatttgtttgtgtgtttcactcttgtcacccagtatggagtgcaatggcgcgatctcggctcactgcatccttcgctgggttcaagcaattctcctgcctcggcctgcctagtacctgggattacaggcacgcgacaccacgtccagctaattttttgtatttttagtagtgacggggtttcaccatgttgggcaggctggtctcgaactcctgacctcaggtgatccatccgcctcggccttccaaagtgctgggattacaggcgtgagccaccactcccggcccaaccccatgttttctcaggaactggagttccctttaggaagcaagtaacagaggtgctgggctgcccgggcctctaggtcgtcttctttcccaggctctgtgctctcaccagagtgcgcgttcgggaagcagggagaggaccaggaaagacgcctgagacggagagtgggcaccggccgggggcaggcaggtccggcccctgggggtcagagtgcagcgccggtttgaggcagttcggccacttagctgcgactcgaartgaatgagtcacttcccctcctcgggcgagctcctggctttgccccagcaagcgggaactcccaggatcaggaaggtcccagagaaactccccaggggggaagccgaggccgtccagagagatccagggtacacacagtgacagtgccagctccacattcccgaccaccgggccagggctggttccacgctgtcatttctctccgctggccccagccgcggggccaccgccagacagacagaccggggatcctgcctggcggcgtgaccttgggttagtcctagagccgcttctagcccggtttcctccgccccaggttaggaccacgtgggtaagaagatttcctctgtagtaggggctgtttaatgtgtaacagaactggctgctggttctttacaattgcccaactgctctgcagaggcgagaagcaattgcgggctgagcctcccgggaccttcgcgggagggaggagaggaggaaggcgggggaggcggggccagaggggcagaggaaggtgggggcgggcggggcttgtctgcgggatggcccaggatgcggtcagctgagttcgccggcccagggcaggcggggcccgagcctagcggtaacccccgggcagggcggggccgctcgcagactccatatgagattcacctcgcargtggttccctcattcgagtgctccggcgcacagacccgcgccccgccgtcygcgagcctcccgagagccgtcccttcgtccggccctggagcattgcgtttgtcgccggtgtcgcagtgcgaggatggcgccgcgggtgtagcggctctctgcgcaggccgagtggtgagtcgcccgcggcccggctcccgccgttctstcttcccaggggtctagcccgtcccctgccttggccacgtgcccatttacctgtaggggcggtgacggaggctctggtgcaccttggctgtgagctgcagaggagcagagagcggcccggcgcggctgcgcggggaggcgggcgcgcggccgggaggttctggggctggtgtgtgcggagcgaggtgggcgtgggggaagcgcgcgggcgggatgtgcttcctcgggtccaccccgtgcctacctctcccacgtcccggcgacggagcgcgcggggctctgggcggggagcccaccgggccgaggcgcagcgagggtgragscagagccggcagggtcaggtcccgcagggcgcaggcgggcgcttctcgcagcccaaacccgggcggggagtgcgggaacccctagaactatgctgggagccccagataagaggaaggagatggtgacttaagtgacgaagtgatgttttgtccccaccgccttttaaagggagaagggggtaaaatttcatttggaggatgattgttacgcgagctttcagagttcagatggcgtcaagtggccatcgagtcaacatttaacaaaatgttaccgcataaaatattgtcatcgagttatctggcagctccgcagagaaacttcacaggcatatgcgttatatgacataatttgcatggggaagggggtcccttcacgattcttttatatggcaacctgttcttggacctggcagggcccagagaagcgaggaactccgcagctcgtcgacacgtctcgtctcctgtcccaattcagggcttgktgaggtgactcgcggtcgcgggtgactcgccggcaggacactgcctggaacgcctggagcgcctcccactgcagacgtctgtccgyctccagccgctctcctctgacggtcagtttcaaagaaacacagtctgggatccggagtagaaagaggccgtttcccgtgaaggccatagaggcagtttccaggcgcctgggtgacctgtctctgcacttccctctctgcttctccatccctgtttcctttccccactgtcccctgcctggcctttctttggctcattttctaccttcctggggtcttctggttaaaaagaccattggttccattcattggctgtaaccgcgggtctttaaaaaactttgtgacttccttgaatagaaagaatgtcttactctggatttctacaagcgctgctgagccattcccagggcaggcctttgtctctcccgcctttcagtttgtttgcccatctgcattttggcccaagctttccccatttctcagctgctcttacattatttcttttttcagaggctaccctgaccttctagtcctctgcattaaacctcatcaccgcagaccgttttaattcagcacaggtgtatcgagcacaaattatattcttggttccaatactttcagcactggtgggcattcatgtttcatttaagaaggataaattagtgtttctttacatgggctttttgtcaaagtggaattttgttgactttactgatcttaaaattaacgcaaacttattgtaaaaacaaacaaacaaaaaaacccaaaaaccaaaaatcaaatatataacagaaaatgaaacttctaggttttcctcttccctaaagataaacaacaaacattcttcttccttctcctctctctctcacacacatttgcttttgaaatatgttcattcaaaaaagtattttaaatgtttacaagctaagttatttatgcaagtaacttaccaatctgatttgagtttaacgggttaaaactaaaaaaaaaaatcaaaaacatcttcagttttttttttttttttaagtaagatggatctggctggtaataggtagagagccccaggtgatcaccgaaaagactcttccttggggagccaaatcctaagccaggtttaggatttccctgggaggtagaatttgcagcccaggtaaaaccagcaaaactctcctgttatgtggggaggggagcgaagagcatggctttctagagaggtgagagaagacttgttgagaaactgaatttcatttccttacggaagttggagaacattgtggtacaatgttaggagaaaggttttctaaaatcagtgcagtctgacatcttcaacaccagggtcttttccactggagcactgcagacatctgcaactttctctgcctacgtgggtgtggttaaatagaccctccctgagtgcagggctgaaaagtggagagaagttagttcttgggacactcacacccaggaggggggatcctgcaggtactaagattgcaaagggaaagagagagtgaggctggtcctggagcccactaggaaggagccagcggaargcagtgactggacaagggaactgatttctctgctgatgtggccttggtttctctggttcagagtaaagaaaagcaaccaaacctagagagaaacatccttactctacaaggccagaygggaagttctgtctttggcttggtttccttttcyacaaacggggttggattctctctggagagctttccgggggccactcagcagtctctgattcagtgggatgttctcagctgctggcccaagggagctcacctcttagctcttcccctgcctggttcactggggggctgctccctcccattagctccctacccctaaagacaaaaatagcagcctggagggggcagagttttaggggaggttgtaagagggcacattcttcagaggagccactcttacgggggaatgttcctgccccacagaaactggccctggggatcaggactctgcctgaccctaaaccctacttcttccctcagtcggtaggtctgcttaatggatcctgaagaaggcctgaaatcatgaccagacccctacgccccgggatcctcctgtagtgccttttgataagaagcactgccctggcttctctctcctccttccacatgtgtagggagaggtagctctgcctattcatgaagcttcatccctacactgtccttcatttggcccctggtgaaccgggggccaaggtgtgatacctcttttaaaactcattcccttcacactggtgttgtgactcatgcctgtaattccagctacttggaggctgaggtgggaggatcacgtgagcccagtaatttgaggcggcagtgagctgtgattgcaccactccactccagcctgggtaacagagtgagaccctgtttgtttcttttttttttttttttgagacagagtcttgctctttcacccaggctggagtgcagtggcatgatctcgactcactacaaccttcatctcttgggttccagcgattctcctgcctcagcctcccgagtagctgggattccaggcatgcgccaccacacccagctacttttttgcatttttagtagagatggagtttcaccatgttggccaggctggtcttgaactcctgacctcaagtgatctggcctcctcggcctcccaaagtgctgagattaggggcgtgggccactgtgcatggccccctgtttctaaaaaaatgaagaataaagtgttgaattaaaaaaaaaatcaacaacaccacaccttattccccttcttagctctccttagctggactgcagtaggctgggatttccaaagaagtgttgtgtaaatgctaagggagaatgaaagcctggtggagagatttaaggcagcaattggagggaacatttttctccacacctaacaactgtagttttccctggcattcaaaatttgctggaaatgatcactatattatggtaataataaatcccattctccaaaaagggaccttttgggttttagcttggtgacaagagactgctgagttacgaaggtgagaaccgtgtggtggaaacaactggcttgacctcaggaaagcagcttcacttcacagactcctactgatgtctttatgagccttggatcatcctgtagacccagtgcttcactctcttcctctcagcatgaatcctgcccactctgcaaggctttccagggagttgggggcctggccattacagggcatttggggatttgtttctttattaactgagttcaaaacgtgagtctcaccctccttcaaagagctctggcaaaaccctgcccttctccacacagagaagtggtcttgggggtttctgactactgagccctagtagaataacttcaggtacgccacgtttttccttcatgggactttgcagtggagacggggccgtgggctgactcaggtcagcctcagtccctctccctcctatggtggtcccctgtccccgctgctccccctggagctgataacttttacccatctttgacccaattcttcctggggagaagagcatctgagattctagaaaagtgaggcagaggccaggcgcagtggctcacacctgtaatcccagcactttgggaggccgaggctggtggatcacctggggtcagcagttcgagaacagcctgcccaacatggtgaaaccctgtctctactaaaaatacaaaaattagctgaacatggtggcgtgtgtctgtagtctcagctactcgggaggctgaggcagaagaattgcctgaacctgggaggcggaggttgcagtgagccgagatggcaccactgcactccagcctgggtgacagagcgagactgtctctattaaaaaaagggaggcagagaggtgtggtgtgttgggtcagtgagtcttgacttgctgagctgggaaattgggaataagggacaggtttttgttttgttttgttttgttttttgagacggagtgtcgctctgcaacctctgcctcccaggttcaagcgattgtcctccctcagcctcctgagagtagctgggattacaggcgcctgccaccacacctggctaatttttgtatttttagtagagatggtgtttcactgtattggacaggcttgtcttgaactcatgatctccacccaccttggcctcccaaagtgctgggtttacaggcataaaggggacaggttctctggaggtgtgaggtgcctgtccacttaggcttttggcacattttcagcacctcctctctgaaactagcaatgctataaacacacatacacactctcctctctctctgtttctatttctcacacaattcacacacttacatcaggtgtgtaaggaattccacttcattgcactgactttctacatattagtggggctctgcacgatcttggtttctactgagtggattcactccattctgtgattttttttccttagggtcctgcctcagttggcggaatggcggccaygggagccaatgcagagaaagctgaaagtcacaagtaaggctccatttcattccaggttgggttgggtggggttggggttgtttatagagcatatgttgtgccacacatttttctaaggacttgacatatattaacacatttgatgcttgtgaaagagactgaggcctggagggattaatgactcaggaggttcgtacattagatggttaaagacctccggggtcgggtgctggggcctcagctcttgattcttaggacatgttgtttcagaaaaccagacaagtccctgctcaaatctctgtctagtaggtttttcctctatgtgccactttcttaaacaaaatcccctgcttatcactcagctctgccttggttctgaattttaaatgccttcttatttctttgcagtttgtcatacttctggtatgcttggcatgacaccacttgtgtttaggcattgctagaaaagcaagaatttcttgtcttcattctgattcctatgtgaactttaatccgctgattattcttattttctcacccccccagttgtctcccacctctgctggggttacctgggcaggccttctgtcctgccgccatggcctctccccagtcttggtggcctctgaccttggcaccacccagggttgtggtgacctctggccccccttgctctggactcctggtcctttgttcctctgtaacttccctgagacctctctgaagtctcacatgtgacagctgcatacccaggtcataattccatatggacaatgctcttctcctcctccattccccagaagtcctggtgtccattttggagtttctggtgcctgtggacattccctgcagtgattttttttttttgagatggagttttgctcttgtcgcccrggctggagtgcagtgagtggckcaatctcagcttgctgcaacctctgcttcccagtttcaagcaattctggtgcctcggcctcccaggtagctgggattacaggtgcaagccagcacacttggctaattttgtatttttagtagagatggggtttcaccatgttggccaggctggtctcaaactcctgacctcaagtgatccacccgcctcagtctcccaaagtgctgggattaygggcgtgagccactgtggcctgcctcagtgattattttttaattgaactaatagtattcctggtattttcagtcattgacagccaaaaatgccttgtccccagtttctggagctcccctccttcctcctcctgccatggcttgaggttgaggcctagtaggaggctggtgggggtggaggggagtggtagaaatgaaggctggagaaaacagggccggcacaccaagtgccaagcaactcagtgagggtttcctccccttccctctcttcagtaattattttaccctcccttgttttatcctcagctatctgctaatcatgttccacttgctgaaaggcagtcaggtgtagagctcaggagtacagcctcttaggaaggatgtgaccttggactttgaatggggttactgatggtacttagtttatactgagagtattaaatgaattgatatgtgctagctattaataacttcatttctaccccaagtcgaaagccttccatgagtggaactggatcttactcatctttrtgttcagtacacccagcacaggatgcttggctgttgcgagatgcagccagcattttctggagccctcccacttccccttccccagtacctcaggcccctgtgtctcacccatctcattttcttcttgtctccacatgtgctggtcctaagctatttgggcaagtttatataaaggttgatactgctttctcttccctgctgataaactcctggaatcagaagccagttttcattgctttcttttttttcctttttgtcttttattgagacagggtttcgcccttttacccaggctggagtgccgaggtgtgatctcagctcactgcaacctctgcctcctgggctcaagtgatcctctcacttcagcctcctgagtagctgggactacaggcatgcaccaccacacccagctaatttttgtatttttcacagagacagggtttcactgtgttgtccaagctgatctcaaactcctgggctcaagtgatctgcccgcctcagcctcccaaattgctgggattacaggcatgagccaccgcgcccagacagttttcatttcatttcatatatttcttttacatggtagatgctcaatgaatatttgctagatgaataaagtggtagaataaagcagaataaagtcacttgaaattatgtgtagactagagaaatatttttttccaggtagtatgtctctgacttgttattttaaaatccttcaaaaaataaattggggcatctactggttcattatggtacatgttaaatttactttttaaattttactttattttttatttttagacagtcttactctgttacctaggctggagtgcagtggtgtgatcagggctcactgcagcctcaacctcctgggctcaggtgatcctcccacatcagcctcccagggaggtgggactataggtgcatgccaccatgcctggctaatttttacattttctgtagagtcagggtttcaccatgttgccctggctagtctcgaattcctgggctcaagtgatccacctgcgttggcctcctaaagtactgggattacaggagtgagccactgtacccggccaaattttcatgttttaaaataattgcctgtcttcacggttacaccctacttccttcttcttcatttctcagaatcaaggagaaaagacaagtattttattttgaaatatgtgacaaagttgtcttaatcacatcctgttttgttattttgaagcatgactcttagcccttctatgttgtactctgtgtatttctaacatcctgaaggaggagaatggaaatgttacttacatgaaaaatagttgtcactaaaggatcctaaaatactgtggggtgtgcagatygtcagaatttcagattggcctagagatcaaaaaggttttctgagaaaagttcaaggatggtccttaccacacgtgattctggatttggtcgcttgaaaaatggccttgccccacatcccagagtagaatgaaccctgattctggagatccccccaatagcttgtcaggaagaggtgggcttaggggcaggcgggtgtggctctgtgcttcaggcaggctgctgtgccttcctgagcagggttttcagcagattcactagtgcagtcagcagagtccctgcctgcccatacaggagacagtcacctagccccctgtccccttatacaaagatctccctgtctctgtgtataaccctttgtacttatgttttctatatcagcctttctgaaatgttcaggtgtgagctcacctgggccccactctaggggaattgatgggaaggaacatttgacagtcatgaaaggaggaagcagtcaggtataggccatctgtgtgtttggagcctgggtgtctgctgttgatgagtgccagatagaaatagggatttgataaaatgatagataaaataggatgggaccatctcaaccttgtttttcttgtctgtggtgtgttacgtgggattcagagatatataagacgtggtcatggcctccagaaatttttgttctggaggtaaagttattacattaattatgtataccagtgttaaaatatagataaggtgtaacaagcatcgtgtggggagagaatggacaatgtctgtgaggggggtgcatcccttatttaacagttatttccaaatccgtggcagctgagaccttgcctctcttgtgtctttttcttttctcatgagttagaatgaggaggagacatgaccacggggttcagggcagaaagtcagactcagaaggaagaaaaagaagtccccaattgctctgacatcagcatcccatgtctgcctctgtttcctgtaagggagcccacccatctctaggactcagaaggcatacattgttgaaggagctacgtttgaggctggctctaagggacttcgacaggcttgagggactcatctagacctggggcatttgttttgtaaggaaggttttattggaacacagacacactcactcatttgtgtgctatctgtagttgctttcacatgtctacggtggacttgagaagtagcagaaatcatgcagcctgcaaaaccacatgtatttattatctggccttttatgaagaaaagtttgctgatgcttgctctagaccagcatgtgccacgagcacattttctagcagataaacagatgtcttatcttgtcactcctattggatatcgtgctggagaagtggtagctagtgtaacaaaaacaaaaacaaattgaaggtatgcagattggaaaggttatctctgggaggtaggattagaggttgtttttccttctatttctgttcatatttcctatggtaaacatagtagttttaaaataaattcaagtttatacatcgaatgaacttgattagaggagcaactggctatactccctactccttgtatgggtagatcaaacatttccatctgtgtactttcgtgtgctcttctgatttcatccctgttgccctccaaacagagccatgggagcaacaggggttaagagggaggagaagggggaagaacagaggggaggcaagtgcggaccttggcaatgttggggttgtcttatctccgggatctggccctgtctttctcccaccatgagcctcgtgtctgacataggccacttctgtgataatgtcggctgtcgggcactgatgttctataagccttccactttcttgttttttaacagtgattgccccgtcagacttttaaatccaaacatagcaaaaatgaaagaagatattctctatcatttcaatctcaccactagcagacacaatttcccagccttgtttggagatgtgaaggtaagaggccaggtgttgacaccttggaatttgccttaagatcaacctccccctatattatacaggtagaccaacccacaaatgcttgagagaccacagctgacaggtttatgaagacataatgtttaccaaatttttgcaagtttttaactttcaagtatgtgaactagcaagtaaaactatcctaagtagtgccaaattgttccctaattcatcttttgcaaatttagtgcagtcatgcattgtttaactctggaaatacggtccgagaaatgcagccttaggtatttcatcattgtgtggacaacatagagcgtaaccacacaaacctaggtggtagagcctactacttgcctgggccatatgcctctaggctacaaacctctatagcatgtgagtgtcctgaatactgtaggcagttgtaacacagtggtaagcatttgtgtatctatacatatctaaacatagaaaagctacagtaaaatcatggtattatataattttctgggaccgctgttgtgtatatgtgattccttgcttaccaaaacatcgttacatggggcatgactatgcatttgaaactatatataaaataaacttcctaatgcttcattgagagaagagaaagatgtaaaaatttcctagggaagcaaaggatagtaaataaaggtcattgtattttgtttgtaatataagatacatattgatattctgtttagttaattgcctttaatgtcttattttgcttcatgcagcttccagttaactttttctacaaagtcttaagtcccttagttctgatttatcttaacgtaggactttgaaatgtctaatgggtaaagatgaactgacatgtagaattaaaaatcaaaatataccaggacgctagaatccagtgctgctacatgggatcataattaaacaatagtgttatgtcttatcaatcatcctgttctttgatagtgttggtttcaaatggtggacaacttcccatgtgcttttaattcattaaaatttcattcatcctattaagttaatccgtagtgatttttattccaggctatggaattttcttttttatgtttagagaataattaataattcttttcttttatcttcagacttttttttttaaattttttgagctggagtctcactgcccaggctggattacagtggtgtgatctcagctcactgcaacctccctgtcctgggttcaagcgattctcttgcctcagcctcctgagtagctgggattgtaggcacctgccaccatgcccagctaatttttgtattttttagtagagatggggttttaccatgttggacaggctggtctggaacgcctgacctcaggtgatctgcctgcccactcccaaagtgctgggattacaggtgtgagccactgtgcccatccatcttcaaactctttaaaaacttactcacttaaaaaaattttttttttcaaaaccaacattttcttacatgatgttctgcaaattaaagtttttacttctctgagagagacccatccagaatagctatcacttcctgagcctcctctaggcttcggctggctcttctcaagcattggctatttggcactcaagtaaccaggcgagagagcggtcagtagcccattttgtggggccctggtaacacagagggacagtgaggagttgctccctctgtttcaaacccaggctgtctccacaggccgccttctacatgacggagggaggccgagggtgcacaggacctggaattacctcctcagagagagcaagggtctggattcctgcgtttgtggagctgactgccttttgatgcttggccgcccaccctgaccactcaccagggggccttgttaaagcagattcctgggccccttagattcagcaggtcctggtgaggccagtgaacttatatttttagcaagttcattggtaatactgatgttgctggtctaggggccccacttgaggacctctgctatagacagtgcactaatgggggtctctcttctctggctgcagtttgtgtgtgttggtggaagcccctcccggatgaaagccttcatcaggtgcgttggtgcagagctgggccttgactgcccaggtagagactatcccaacatctgtgcgggaactgaccgctatgccatgtataaagtaggaccggtgctgtctgtcagtgtgagtacctgccttcccttgtgctcagtctctaggctctgcaaccccctgtgccccacccctctgcacacacagacagctggtcccctaacacctgcttactgtaaatggctgggagcagggtgagcccacagtagctgggattcagagattattgaactcaggctatcgtccttgaggctcagtctccaggggcgactaagtacacaaatgcatatacaccgctgtctgtctacacagtgtgagggtggcaggtgcagggagttagagtgcttggggtgtagaggaaggacagtagggggcgccctgcctggagcaggatggaaggagagcctcaaagtaccaggcctctaatcccctctaccacctcacagtgagttacttcaaaacacattttgatttagcaaggagcatggtgaacacagaaatctccagattctaccatagaagtcttttcatttttcagttttgattttgtcaggagcaatataaatgaacagctgcagagtaaggaaagggaaccccttttgttgagatgtgcacccctacctctccagtcagctgaggacactagctatgtcaaccaactagaacatatcagggagccaagacatkactaggttactgataatctgcgcaagcctttcctgtgtgtaaggctccgtgaccgattctagcagggatgcctccactgtatggctctgccacaggaacagcccctggaaagtgctgagttcatccggggagaggcatcacagaagttgtgacactagggggggtgctctgaagaggagagcaggagaaggaggtatgcagagaccccaaagagaggaaaaggcacaggcagacaagatcagcaaagcatcctgtgtccagtgggctgaggaaccagctgattacttagtttgtctgaagcagagggtgtagggagaaaagagaaaggagataaaactttaacctgtggtggggtgtgggagaatagggtgggtatttatgcagggcttcaaatgctagaaggagctgtttgttacctggcaatagcagactgctgcttccctgctgagcccctgggtccgcagctgttacctatttgacaaattgtgtcgatcaaatggggttttgtctttgacagctttgcatacactttaaagtttcccaaagtgttactagttcttaaatttatatttaaaaagtttatctttcatcactatgtcaatgggcatgttagattgaattacatcacatgaaacatcagccagaacattgacaaagtcacaaccttggcttaacatgggtgtttctccctggttccagcatggtatgggcattccttctatctcaatcatgttgcatgagctcataaagctgctgtactatgcccggtgctccaacgtcactatcatccgcattggcacttctggtgggataggtaaggtctgcagaggggcctcttgccctgtgaatggatgagggactggggcatgccaaggcagcttctacatggtgtggcattagagacaaagagttcctttcttggctttgttcaagggaagcttgttaacaggaggtgtgaaaagaagcttgttttgttgtttttgtccaacctgttctcccaacccgcaccccagagctaggcagtagaagggcaccacaccatgcatatgggggaaactcatccttttggggttacacaatttgtgccttcttgtctgcttgattctgtcttattctttctaatcccccttcttctccattctctcctttcctttgcttacttttcctcctccctaatcctgcagggattttgaagcaccttaggagaaaagacacaggaaaatcaaaggggggaagagagaggcgcagtacaaaactcagataagtgtccttaaattagcttaaaatgtccctatcctcaacagggacattttttttttgtttaaaaaacaaagatggttggccgggcgcggtggctcacacctgtaatcccagcacattgggaggccgaggcgggcggatcacaagatcgggagatcgagaccatcctggccaacatggtgaaaccccgtctctactaaaatacaaaagattagctgggcgtggtggtgcacgtctgtagtcccagctgctggtgaggctgaggcaggagaatcgcttgaacccgggaggcggaggttgcagtgagccaacatcgcgccactgcacttcagcctggcaacagagcgagactccatctcaacaacaacaacaacaaacaaacaaacaaaaacccccacaaacatggcaaagaaagaatgagatttaatgagaaagcaaaagctaacaaattgttgaattgtaagccaaagtctgttaggcagatttgttttaaatacgtggtcttgctctctggggttccaactctgtgccattctttctgctaaaaactgggttctagtgattcctgctcccaccgaggtgttcagagctcagggaagaagcctgcatgtgccctagagaaagttgagctttgccgctgctggccaggcctgtgtgtacttgttccaggctgtctagggcctggactatctaggatttatagcaattctagaatttaagtgtcctgaccttgaaaggggacttgctttagacccaaatattttgaatatgttatcttgtctcttttctttttgttatatagagagattgatgcataaaatctgtgtttgtatgactgtaattccaagtttagcgaaattgtccctaggacaacacaccaacggccatgagctgtctcggtcctgcaagcttagtctccgatgctgcccacctgacacagctgtgcatagcatgctggcctctgccaggaactctagtgaatggttcttgagttcttgctctggagtgatttttaaaacaatgatcagataattctggagggagtagtatagattttgaattttcctcaattgctctgtaaaaatggaaagagcaactagggagcaaaaccaaaaaccactggacacagttgataataaaaggtgatgtgctatcctcacaaaccccaaagtatgaaygggtggagacaaaaagcctcaggatctggttgtgttggcagctgctcagggggaagctcaaggcgatggacagacctgagaacaagagtcccaggcactcctaggaaggtgcagggggacatggtgaagatggcagctgacactggagggggcctgtgcgtcccaatgtgagtgatgctggaattccaaggggcttgaccactccaggccctgtgggttcaccaaggcatcagccaagctctcctctagctccagccccagtgctgggagaagctgctgaaatgagactctgaattgcccagaacagccgcaggagtagcaatggaaagaggagttcagatacatgtggggagcgaagcaaaggtctttgcaatcggccatgttttttaatgtttcatgaaaacaactgacttgggagctctggaaaagatctgacttcttgttccctcccacatgtttaggaaaaccaattttgcattaaaataagtatcagaaatggatcatagttatcttagtccctgcaggttgatagacaagatgccattgactgagtggcttataaacaataggaatttatcgcgtagtctggaggctgcgaagtccaaggtcaaggagtcagcaaacttggtgtctggtgagggctaactttcggattcatagagctctgttttctccctgtgtgctcacatggcagaaggggcaggcagctctccggggtccctcttataagggcactaatcccactcatgcaggctccaccctcatgacctaatcacctcccaaaggccctgctgcctgaaaccatcacatttagggttaggatttcagcctatgaattttgagggggaaaccagcattcagtccaggtccataacaatggtcaaatcccatctaaaattattataacacaaagaataaggggcagagtaatgtccctacaaacaggaaactactccaggaaggcacgcccagaacatagaaactggaccctaataatgcatcaatctgagaggaaggccaggtaggtcaggagttggtcatagctcacctgggtttagggtgtgggacttcattatactgttctagtctgccttttgctggtttacttttcaagtatttgcctgaaatcttaaatattaacaaggtatgaaacagggatcaatgaaacacatcatggtatatggttcagtgacagacaacagtgggaaatcgccgtgaatggaagcaagaaatatgggacaaagtacttgaaggttcctggccatttttattttattcttttttttttctttcgaaatggagtttgctctttttgcccatgctggagtgcagtggcgtgatcttggctcactgcaacctctgcctcctgggttcaagtgattctcccgcctcagtctcccaagtagctgggattacagacacccggcacaatgcctggctaatttttgtatttttagtagagatggggtctcaccatgttggccaggctggtcttgaactcctgacctcaggtgatctgctcgtcttggcctcccaaagtgcttgggattacaggcgtgggccactgcacccagccctctactttgttttttgtgcctttctcttccatagtgtccataatgatcatgcattaattactttcatagcttaaaaaaaagttgaatgggaaaaatgggtcactgtgtatttgagaacagtactggatgcttcgtgtttggatgtgtgggtggatctgcttctttcttccatatgctctgctgtgtgctccctggctgccctgctttaattttattttgttttacaccctgcatatcttgatgtctgcttttttcctcaggtctggagcccggcactgtggtcataacagagcaggcagtggatacctgcttcaaggcagagtttgagcagattgtcctggggaagcgggtcatccggaaaacggaccttaacaagaagctggtgcaggagctgttgctgtgttctgcagagctgagcgagttcaccacagtggtggggaacaccatgtgcaccttggacttctatgaaggtgaggcagcggatacgaggaggcatctttcagccagggaaccctggtccgtcccctgagcctgccttctcgctgtggactggcgtttccacttgccaggctgctgtctcagttacacttcgcccagagtggttataatgacccgtttgagtggtcattataggcaggacctggatgggtcttgcttgtccctgtgtccttctgggcatcagtggcgctgatgtgttgtaggagcttctcacatgcatgtggttctcatgtctccatgtgtgcctcagggcaaggccgtctggatggggctctctgctcctacacggagaaggacaagcaggcgtatctggaggcagcctatgcagccggcgtccgcaatatcgagatggagtcctcggtgtttgccgccatgtgcagcgcctgcggcctccaaggtaagcggcacttgatgggcctcggcgtcccctcctcccttcacttctgctctcctggagcccctcgctggggcccctcctcctggggcaccccgatacccatttctggtttctgtttccgctgcccccaagtcactttctgacatatgtgttgtcaccacaatgctgttcaatgtctgactgtcacaccctgacaaaatgcaggattctcagtgaccttgtgcaggaaaaatgacaaaaaagcttttgctgccccatgaggctgccaccaggtctataaaaaactcggctttcaaagcgctttggctttctgaattgtggttcatctaccctcaaggtactagccacccttgaaggccagctcacagctctgcagaattcccttatcacctcggccaaaacgtgcctttcaaggtggtgcttgcagccctgagctggtcctggaatggtgaattccttttggaagcaggcacgagaataagggagggacagggcagggtggtgtcagagagggaggagtcttccgagcccctggaccagcgcctttccctcccgcactccatcctccggccccgcctgactgcatgggcagcctggtttcctgaggaggcagagaggctgctcctcagagctcgtgggttcttcatcccgtccctgtgaaatgttagacccccggcaccttgccttgatgtggtctttgtcctttgcagcggccgtggtgtgtgtcaccctcctgaaccgcctggaaggggaccagatcagcagccctcgcaatgtgctcagcgagtaccagcagaggccgcagcggctggtgagctacttcatcaagaagaaactgagcaaggcctgagcgctgccctgcacctccgcagacctgctgtgatgacttgccattaaaagcattgtccaaaatcccctgttgtgtggactttgagcacactttacacaagaatctagaaaatcagatcgcgattaagagacagagaatcttggattaaccgcatgggagatgttcttccttttgaagtttcattggagcattttcaatgatgttagcctgatttggggtttcttcaagaacattctaccaaatttttgtactatttctagggaaatttttcagactttaaaattctaatggtagtcagatttcatgtcactaaacaagaaatctgacaatagtgccaggaaactaatttcctgatacattaaaaaaattccatgcaccacttgcaatgagagatgactgaaaaccaatgaagcagacagcaggggtgtttgagaaataatgcgtacctaaacaggcatatacacagtttccaaattatagtcacacacattcccaaaaccatccacaccagcttaatcacacgacagtaatcctcccacccattgtccacaatgctagtgtcttgatccaagtacctagggatgggaaacgggacacctgggctcaagacagcttgtcctattgtttctgtccatggcttgtcagccttgcattcattcctggcctcacactgacattcctagactccgtgtctcttagcttccttctcggttgcaccttatagtggaggggagaatccagggtggcccctctgtctgtctcgggtgagtctggcagcagctacttgggcaggcctaggtccccagctcaggggcagctgggtcttgggtcttcactggcttgtgggttgcccaggctcctggctgacttctcaactctccccacatcagtgtggccactttctggtatttattgtttcctgtccttgagatgggcttatttcctggtgggctctgagggacactcccatgctcaggggctctgcttagcagtttgctgtgtgacttggagtggccagggaggtgtgtggggaccttggtgtgggtgcatgtgtgtggtctgtgcactctttaatgtgccttccctgtgattctgagattcaacccaaaatgagggtcattcannnnnnnnnnnnnnnnnnnnnnnnnnnnnnnnnnnnnnnnnnnnnnnnnnnnnnnnnnnnnnnnnntccttgtcccaatcaaaaacttccttcccttccaccttctcaagctctagggtctgtaatacagatttgcttagggtggagagtgagtctccttccatttctccctcagcacttcttggtccctttgttgaagctgtccaggagaaattggaaccctcaaggagacttcagggtcctgggatgtggctgtgcagtcatctgtgcacccagggcagcatgctaaaggctctgctcctggcttctcactccagcacgagctgcaggggctggacttgctactattgtgcgctcatctgtctccaaattaccaagtgcccccagacttcaactggatgtcaccatgcccctgtgggtgcaggacccagtgtgggatagcctttctatcctctgaccaaccagatgatgtttatcaccaggctctggggcaggctgaggatgcaggtgcggaccattgccccaggcagtaggggacttgcaggttaatttctttcacacctcaacccaggcaagtgtggccaggtgggcccgccacttcctaggaggacatctttgataaagcagagaaaaaaaaccacacagaaatagaatttaaggctaaagaggaggctgctattagtaagaaaagggctagtttgtttttgaggtgttttgtctctgcactgcctggaagtctgtctcgctgggggagctgtcacagagcctgtggcctgagcaccctcctccgggacaaggcagaaggtaaaatgacttctgaacatgagattctttctacaggtgtcaatggccaagctgcagctattggcactgcactgccctctgctggctatgtgaggtagtgcacatcagccacccccaggtggatctctgttgatctaatcgggcgacatccctgaccttacaggtgaactctataccccctgacacgcaggaaatgccggttgaacaacacatcttgttctgattgagtaaacatgaacttgttggattagtttatgtcggcctaaaaggaagaagctgaggcaaaattggtaaaagtagagaagtaactgggtccaagcttgaagactgcaacccaagaacatagattcaagttcccctgaatgaacactctgattagcagcacttacaagtggatttttaaaggtaaaagggacagggaatgggctgatacacagctgtctgccaggaattctcattggtttacagaaatgatattgatcaatggctacacattgttaagccatagagtgtgggttctagtattcagtgtggcattattaagttaatttatagctacttgtggcaatagcaagcagttccaagagatgaatacatagttaaaaagggggagtgattgatgtctttttcttgagacaaggtcttgctctgtcacccaggctggagtgcagtggtgcaatcacagctcactgcagccttgacctcctgggctcaagcaatcctcccacctcatccttctgagtggctgggaatacaggtgcacgccaccacaacctggctaatttttgtatttttttgcagagatggggtcttgtgtgttgcccgggctggtcttgacctcctaggttcaagcgcccctcccacctaggcttcccaaagcattgtgattagagacgtgagccactgtgtttggcttattgtcccattttaatgtctctctggctgtaataatttgaaaggtctcaaattcctcagatgaaagttattttctttcctcatttggctaccaagatgtctctggagctgacgttataaatgtcctcacatgagtgttacttgaattcctcgggagacgaccagaaacttggtccccttcctcaccccgcactggccactctttgactttcaggcccttgtgccacgctggtatcattggcttggtccccttgtgggggcttcccacaacctgggcactggccccttcctcaacccctcctccattcccagcgctggtgataaagactcttctgagcaggaatataatgacaccaacatggttcacttcggtgcttcagcaaggcagagagaattaggaatgtaattgggattgttctgatggaactaattaccctggatttcaaaaatcgttgtcagcgagttcactccatgttttcctctagtgcagtccttaagtgatatgctcagaatgcctcccactaatgtgaaaaaaaaatgttaataattatccagccctttgtaaattggaaaatcagcacgtcactagtgagttagtcaagagtttacctcaagaagcctgccacgctctcacataaaaggttgggctttggtgtcaattgcagaggtggccacgctcctcctgctgcctcctcgcggtccagtctcatcacagcggtgacaatgccannnnnnnnnnnnnnnnnnnnnnnnnnnnnnnnnnnnnnnnnnnnnnnnnnnnnnnnnnnnnnnnnnnnnnnnnnnnnnnnnnnnnnnnnnnnnnnnnnnnnnnnnnnnnnnnnnnnnnnnnnnnnnnnnnnnnnnnnnnnnnnnnnnnnnnnnnnnnnnnnnnnnnnnnnnnnnnnnnnnnnnnnnnnnnnnnnnnnnnnnnnnnnnnnnnnnnnnnnnnnnnnnnnnnnnnnnnnnnnnnnnnnnnnnnnnnnnnnnnnnnnnnnnnnnnnnnnnnnnnnnnnnnnnnnnnnnnnnnnnnnnnnnnnnnnnnnnnnnnnnnnnnnnnnnnnnnnnnnnnnnnnnnnnnnnnnnnnnnnntctcatcacagcggtgacaatgccaccttgaccagaaacaatgagatgatggtttgtctttataaatgacaatagggacagtggaatatgttagagcatgagctgtgcgtctcctatacctttatccttaagcctagcactaagccacgttttaaagccaggtgtccatcatatattgtattatccggtaattccactcctgctcctgggcttgcatggagagaactcatgtggcccaggaaacatggacaggaatgttcataattgcaaaggcctcggtaacaaaagccagaagtccccaaatatccatgtgccagagaacaaatgcaatgagtttggtgtgctcagatgatgaaaaacagtgaaaataaatgcagacaccttcaccatcagtacagaaccatctcaggtaacattctaagtgaaaaaagcaaattgtagaatagtacctacaacatgattccatttatataaagtttgaaaatggacaaaactaaacaatatgttgtttaggattacgtgcatttcatggtaagactaggggaaaaaactccaccagggattgagaaaccccaattgagatcaggagtttcctctgttgggaggcagggtgcatttgggaggaggggggacccccaaggacatcaaagatgttctgtttcctaggttaggaatgactttcacatcagggcttctgggttccattgcagcttactcatatttcagtactccttggtatgtatgtaatagtagaatatcatctcattaatcaccacccagacattaggctcaacttataaaataaggaagcagtgctagtataagaaaatagtactgctctgctggtgcttagtagtttttcagttaccacgtacatgaaggagagcgatttctgaccgattttcatggagtaggatcagctctgcagatgtgagcttttaataatagctaatatgtattgagccatcgttgtcaggccccttgtgtggaacttccatcagcgatcctgcctggccctctccccatctgtgttatccccaaatgccagatgaggacacagcctgggctcaggtctgtgtgagggttgggactgtgcggccacagtgtgttattcacatatgtgcacacatacacacctgtgcgtttccatgcacattcatgcacacattgtcatacatgcacagccatgcagaagtttacttactaggaaaagagtagcactcagttctctggacttcacaaggagaggagaacacaggtatgaatgtcagtccttggcatcccagcgtagtctgtgctgcggtggggtggggtgggggctggtaagagttctcctttagggtctctttcagtgaatgttttgtaggaagaaaattttaaaaagggtaaaatcatgactgccatacagaaatgaaatgaacatgtgtgttatggaaataaagccaacccgccagtggtaggcctttccatgtccagtctaggagagagaaagccccagttatgtgtgctgagactccacgcgtgtgggaggggactatgtggagggagtcttacattacacagtgaagtggaggaaaaatgagaacttcccccagatctccttgaagggtgactggatgatcttgtgacagtccctgcgtgcctcccgagggtgcctgagttatttgggtgcatgtgttcccagttctagggggcagaaggccctagaccttgctttataaaatcaaaatctctcacccggctgattctggaggcactctaaggagggaggagggaagcaactacctcccacaagaaaggttcatcattttatccttacacatggaaaatactttttttttttttgagacagtcttattctgtcatccaggctagagtgcagtggtgctatctcagctcagtgcaaattctgcctcccaggttcaagctattctcctgcctcaacctcctgagagctgggactacagtcatgtaccaccacgccaggctaatttttgtaattttagtagagatgaggtttggccacgtgggccaggctggtctggaactcctgacctcaagtgatccacccgcgtgacctgcccacctcggcctcccaaagttctgggattataggcatgagctgctgaattgcactcaccatgagggaagctggcaggtgctgtgactggttctcagaggcagtcccagtggcaggagttcacacggagtgaggagcatgaagtacagatggaagcagagccagcctctcagcagggcccacaggggcagtcaagcctctccaggcaggacagaagttctctacaattcccagggttgcaaatagctcctgtggaagggacgccagaagccctgcagaggcaccttgcagagtctggacaaggcagggttccctgcagggcccc

SEQ ID NO: 94573 - DNA, 18000 bp, Homo sapiens
  misc_feature (1)...(18000): n = A,T,C or G
tatttctattattattacattataatatacagtgaaataattatataactcaccataatgtagaatcagtgggagccctgagcttgttttcttgcatctagatggtcccatgtgggggtgatgggagatagtgacagatcatcaggcattagattctcataaggagcatgcaacctagatcccttgcatgtgcagttcacaatagagttcaagttcctatgagaatctaatgccaccattgatctgacaggagatggagctcaggcagtaatgtgcgtgaaggggagtggtagtaaatacagatgaagcttcatttgctcaccccccactcacctccttctatgtggccctgttcctaacaggccacagagcagggattgagggccctgctccaaaccactgaacagatatggatgtgtgttgctcccagtgtcactgaaactgcatttgcaaaaatgatgaaagtcaaataaatctgacatagctatttccatcttgcttctaacctcacaagctgtgtgttcattcctgggcataggccaagctaactacgggaggaatttatagtttaactgtaaggcaaagacaataatagctccttccttcccaaaactaaccccctacttgttcaggaaccaaaaatcacccttgaaaaactaatgaaaggtcacaaggttaggattatgggaggggcctgaattgctaagaagtaggtgtagttaagtgataactggctgggcgcggtggctcacacctataatcccagcactttgggaggctgacgtgggcggaacatctgaggtcaggagttcaagaccagtctggctaacatggtgaaaccctgtttctactagaaatacaaaaaattagccgggcatggtggcacacacctgtaatcccagctacttgagaggctgaggcaggagaatctcttgaacctgggaggcagaggttgcagtgagccgagatcgcgcaattgtactacagcttgggcaacaagagcgaaactccgtctcaaaaaaaaaaaaaaaaagaagtgataaccagccactgtccccagcttgcttttcttttttcttttctttcttttttgtttttttgagatgcggagtctttctctgtcgcccaggttggagcgcagtgcagtggcatgatctcagctcactgcaacctccacctcccaggttcaagtgattctcctgcctcagcctcccaagtagctgggattacaggcatgcaccaccacactgggctaattttttgtatttttagtagagacggggtttcaccatgttggccaggctggtctcatactcctgacatcaagtgatccacccgcctcggcctcccaaagtgttgggattacaggcatgagccaccacacccagccaccaactatccttgaaaaaccctagcttccgtattcttagggaggcagatttgaaaattatctcccatccttctgcttggctggccctctgataattaaactctttctctgctccaaaaactgttgctctcaatgcattggcttttctaggcagcaggcaagaagaacccattgggctgttacagcacttccagaggtagtctaataactcctctccaaaaagtcattttggtggagaggtggagcaagatggccaaatggaagcctccaggaattgcccccgacataggaacaacaaattgaacaactatccacccaaaaaagaaccttcataagaaccaaaaatcatgtgagcaatcacagtacctggttttaacatcatattaaggaaagaggcactgaagagggtaaaaaaggcagtcttggattgcctacaccaccccttccacatcccccagcagtggccacatggcatagagaatcagtgtgcttgcggaagggacagggcagtgattgcagggccttgcattggaactcagtgctgccctgtcacagtgaaaaacaacactgggcagaaatcagccagtgcccagagggagcatgtagatgagccctagctagagaggagtcattcatccaagcagccagaacctgagttctagcaggcccagctaccgtgggctaaagtgctctgggggggtcccaaataaacttgaaaggcagaataggccaaaagaactacaattcttgggcaagttctgttgctgggcttggagccattgggcttagaatgtacatgacctagtgagatgctagccagggaggccaagggaatgcttgcatcacccttctccaagccacaggcactgctgctgacagtactgggagagactccttcccaccacttgaggagaagagaggggagagtaaagaagacattgtcttacaacttgaataccagctcagccacggtagaactgtgcactagggggaggcccccatttcatgccctagcccccacatgaaatttctagagacaccctgggccagaacggaacctgttgccttaaagggaagagcccaggcctggcaagattcatcacttgctgactaaagagactttgggcttgaataatcagtagtagtagccagccatgctggcttcaggtgtggtggcttcaggggagagactcctatttgaggaaaggagagggaaaagtaaggagactttgtcttgcgacttggataccagctcagctactggggagtagggcaccaagcaggctcctggagtccctgattccatgccttggctcctagacagcatttctggacatgccctgggccaaagaggaccccactgccctgaaaggagaaactcgggactaatagcatttatcacaagctgactgaagagcccctgtgccttgagtgaatgttggcatagccaggaagtactagccatgggctagtgcaatggtggtcatggggaaggactttgatgcttgaggaaagaggagggaagagtgagaataactttatcttgtggtttgggtgccaggtcagccacagtggaatagagtaccaggtagattcctaaggttcccgaccccaagccctggcttccagacaggatctctggacctacttgaagatggagagaacttgttgccctgataggaaggacacaaggctggctgaattcaccagcttctgaatgcaggccttgaggaaacataagctactgtagctagacagtggtcactgcaagccttggaccagacccagtgctatgttggcatcaggtctctcctagcacagtcacagtggaggcagccacaagggtgcttgtgtcacctctcccctagctccagacagctcagtgcagagactccatttgtttgggtgaaagtaagataagagaacagagtctctgcctggtaatccaggtaattctcctggatcttacccaagaccacaaatgtcatacccctacaagtctgcaaaagctatagttttactgagcttcggatggcccctaatgcagatatagctgcagtgaccaaagacttagatcacaacacccaagtcccttcaaatacttggaaagccatcccaagaagggtggatacaaaaaaataaaaagcccagactgtgaagacaataataaatacctaactcttcagtgcccagacaccaacaaaaatccacaagcatcaagaccaccctggtaaacacgacctcaccaaacaaactaatgaaggcacaagtgaccaattccagagagaaagagatatgtgacttttcaaacagagaattcaaaatagctgtgttgaggaagctcaacaaaattcaagataacacagagaagaaattcagaattctacaagataaatttaacagagattaaaacaattaaaaagaatctagcagaaattctgaagctgaaaaatccaattaacgtactaaaaaatgcagtcccttacaggcagaattgatcaaacagaaggaagaattagtgagcttgaagatgggctatttgaaaatacacactcagaagagacaaaagaaaaaagaataaaaatgaatgaggtacacctataagatctagaaactggcttcaaagggcaaatctaagagttactggccataaagaggagctagagagagagatcagggtagaaagtttattcagcgagataatgacagagaacttcccaaacctagagaaagatatcaatattcaagtacaagaaggttataaaacaccaagcagatttaacccaacgaagacaccccaaaacatttaataatcaaactcccaaagatccaggataaagaaagaatcctaaaagcaagcaagagaaaagaaacaaataacataaaaaggagttctaataagtctggcagcaaacttatcagtggaactttacaggccgggagggagtggcattacatatttaaagtgctgagggaaaaaacttttatcctagaatagtacatccagtgaaaatatccttcagatgtgagggagaaataaagactttcccaggcaaacagaagctgagggatttcatcaacaccagacctgtcctacaagaaatgctaaagggagttcctcagtctgaaagaaaaggacattcgtaagcaataagaaaccacctgaaggtacaaaactcactactaacagtaagtacacagaaaaacacacaatattataatactgtaattgtgtgtaaactgttcatatcttgagtagaaagacttagagattaacctaacttatcaaaaataatagctataacaacttttcaagacatagtataataatatataaatagaaacaagaaaaagttttaaaagtggggagagtgaagttaaagtgcagagtttttcttagttttctctttgatttttgtttatgcaatcaatgttatgttgtcatcagtttaaaacaatgggttataaaatattatttgccctgggcgtggtggctcacacctgtaatcccagcactttgggaggccgatgcgggtgaatcacctgaggtcaggagttcgagaccagcctgaccaaatagtgaaaccccatctctactaaaaatacaaaaattagctgggcgtggtggtttgctcccgtagtcccagctacttggggggctgagacattaaatggcgccactgaagaagaatgaataaggtctagtaatacaacagggtgactacactcaacaataatttattgtacattaaacaaactaaaagtataattggattgcttgtaacagaaaaaaaggataaatgcttgaggtgatggatagaccgtttaccctgatgtgattattatacattgtatgcctgtatcaaaatatctcatgtacctcttaagtatatatatatttacctacttcgtactcataaaaattttaaaaggtacataaatgttatcattgcatcctcttaattttatttttcagttccagagggataatcctgtctctgccgcaaatgcagcaccttcctcagtcttggggcgtccatcaagcggagagctggaatgtgactgaaagtaacagagtataggtggaactagaacaaggtcacgagctggtgcccaactcgtgtaactcctggttccaggctgtccctctaggatgctgttggcgccagccgtggtagtaggacagagtctgggtaaaggtcgcctgctgacaagatggtagctaggagacctctaggtgcgccaaaattagggcgtcttttcctggaccggcaaaacgccctgctcaaagctcattacatcaccacgcccaagaactgatactttagcagggcaacgcaccaaccaagcgactccgccccaccctccccgctcctccagcacacgcaagcgcacagaggcccgcgagtgacgtcacctctcccgacaccacctcgttgtcgtacgaccaaaggcctgtcgtaacggccgggaaaagcctcgagaagaagggcacgcacgccgtacaccctaacatgctcgccagcatgcgcgcgcaggtccttggcgcaggcattgggactggagccaatgaggtgcggcgacgttacygcgtagccgccagctcggccgcacgtcagggcgcgggagcgcggagcgagtttggttgcacttacaccggtacttaagcgcggaccggcgtgyccttggacttagagagtggggacgtccggcttcggagcgggagtgttcgttgtgccagcgactaaaaagaggtgagagcgggtcgcggaggccgcacctggttagaggcagagctgtgggaggcgcgcacttgcgagcgaccgaaacccaagcggggagcattcgagtggagcccgcgctgggtgggagggcggggagtgaagaccctggactgtggtcagaccgagctgggcgagtaacggcttgaggtgcggcggagccctaactagggacaggtatggtctcggtcagggactggaggcggcttggatacagatccgaggaggaggcggcctcttccgtagtggttgctgaagggctatggaaatgataggcaagacttccctcctggaaagccgaagcttagagcttcacgttcttcttcagagggcaaaagctgttgctcttctaataaggggccagttcttttcgtgggcacatgtttcttccgtcagtcgttctgacatcctagaaggagtttcatcaatcaccttgaaaccgacctggacgggtgacctcgtggtcgccccaggagatcacaggtaggggagttgggattgccccgggggaccgtgcagcctgcccctgcgctcccattcacaagttcgagtgtcaagctactcctgtgacctgggcagatagaaacagccaggaccgctttttaaacatttgtgtgctttgcgttatcctcagggagaggtggctttacattgtagtaagattaaatggttaggtctttttaaaagttgcggttgtggtgattttggcttaatgtgttcgcccttgagcttcatgatcttgtgacttcgtggactggggatccttcgtagatgtcggactctgcacgtcatggcaatgctttgctatctcggctgactgctgtggtgnnnnnnnnnnnnnnnnnnnngatcaaaagtggccaactgttcaaaccctgttcaaataagacaaacaacaaactgcaaccgatccagctgtttctgtacctcacttccattttctctttgtcatgttcctttttctgtccataaatcatcttcttccaccacatggctgaactggagtatctgagcctactctggctcaggaggctgcctggttaagcttagagcttcacgttcttcttcagagggcaaaagctgttgctcttctaataaggggccagttcttttcgtgggcacatgtttcttccgtcagtcgttctgacatcctagaaggagtttcatcaatcaccttgaaaccgacctggacgggtgacctcgtggtcgccccaggagatcacaggtaggggagttgggatgtccccgggggaccgtgcagcctgcccctgagctcccattcacaagttcgagtgtcaagctactcctgtgacctgggcagatagaaacagccaggaccgctttttaaacatttgtgtgctttgcgttatcctcagggagaggtggctttacattgtagtaagattaaatggttaggtctttttaaaagttgcggttgtggtgattttggcttaatgtgttcgcccttgagcttcagatctgtgacttcgtgaccatgattgtctcttctgaaactggagtttgaattaggttccctctttgcttgggctttaacgttccttcacgtatacacacaaaaatacgtttttgaggaggtactcctaaaaatgtttttggtattaaagaatatttggtataaagagtattaaagcaaaacaagattcattctggtatttaatgacataaattagcaatggattggtaattaagtggctagagtggtcattcatttacactgtatttgttacctgaggaaaaatttactaagttgaagctttcgtttttagaaktaaatatgggtgatgttgagaaaggcaagaagatttttattatgaagtgttcccagtgccacaccgttgaaaagggaggcaagcacaagactgggccaaatctccatggtctctttgggcggaagacaggtcaggcccctggatactcttacacagccgccaataagaacaaaggtaagagtcacttgttaaataaaacaacacaaaatgcaggaatataacatgtggcaaactatcaggagtgtgaaataaccgatgcattctttcttgtttaggcatcatctggggagaggatacactgatggagtatttggagaatcccaagaagtacatccctggaacaaaaatgatctttgtcggcattaagaagaaggaagaaagggcagacttaatagcttatctcaaaaaagctactaatgagtaataattggccactgccttatttattacaaaacagaaatgtctcatgacttttttatgtgtaccatcctttaatagatctcatacaccagaattcagatcatgaatgactgacagaatattttgttgggcagtcctgatttaaaactaagactggcttgtggttaaatgaatatgttcagtttttgaattttaatagtaaytccaattcagtaaatrgtatcactgtttaccccttttaaagatatgattagacttcgttagtaatgttcaacttttcacaaagatggtgagtgccatcttaaaacttactggagattggttttatatttagatttatataactggttatgtgaatatatttaaatactggggaaattgcttcactgtcttagaaccaagcaagattcacctgtgttttgtgttcatgttcatttgcctcttaaaggcaagggttgaagataaataaggtagcaatgtctatagttttggccttaactatgccaatctaattataattccctgtatttaaaatggtttcttttacttattgaaaggcattttagtgtggtttatgtgtaatattaaagattattcaacacctctcacatcttacagatctataaggtcacatgcttttaaaatagtagcaagttaaacttcactcttgaattctttacaatctaagtcaaactaagttataatttaggattgtctttaaacagccattcagaaacaaaactgtagaactgtgtatttgattgggaatggtgcttttgccaacttaaaaggattaaagtaacggagatatacacaaattttaaaattatgtgtgatcacaagactaaagataattaaaaagaaaaccacagatcatgactttttgactgtgcttgatttcatgactgatgcacaaattttaatgattaaaaagtgcaggagccctaaatgtcagtgcagcagccctaaatgtcagtgcagcagtgttaaccagtcatggtgctagattgtttacttggttttctaggactgcctcaactagaataacacttcactaattgactcttagtttctttgctcagattgagaactgcagcatttatgccagacatggacagaggaatgcctgtggtcatagttttgtgatgtgtaacagtgtataattacatactgaattatttcatgcatagtctgtgccatacacatttagagtagtccttggagattttatggagatggtgagcacaaggtaagtcataaagaataatgagaaaataaatctatgctggtgcagctgagaactgtatctttgtgggacagtgagaagactgagaagatgtgaatccatggtctcaaaggtgatagggacgattagataggtgttttaaggcctgaaagcaatttataacatatgagtcttatttttatttatagaaatgtggaaagcttgctgtaattcatatttgaagtcctagtctgagttctggtggggaatttaaaaatgcatcctggaaatcctttaaagatttcagactttgaaaggccttgtagcagaggacttggtgactgtataaagttagtggtattcagggacagtgtagcaagtagcttacaaggggacaattctggactaatgagaaagacctgaagtgaaggctagagagttgatttttttttttttttggcatcctggaaatgatacaggaaacmtattaagatagayacagaaatgtgttcaaccttccatcttggctagttgtggcgtttagtttgttttttgagacatggtcacgctgtgtcgccaaggctggagtgcagtggtgcgatctcggctggctgcaacctctatttcccaggctcaagcgattctctcacttcagcttcccaagtagctgggactacaggtgttcgccaccatgcccagctaatttttttgtagagatggagttttgccatgtggtcccaggctggtctcaaactcctgagctcaagcaatccgtccacttgccttggctccccaaagtgctgggattacaggcgtgagccaccaggccctgcctggttttcaaattcagaaatcttattatttaacccagaagtaatcagcccagtagtaacttaggtttaattttttttcaggtttaaaatttttctcatttattttttctgagacggagtttcgcccttttcgcccaggctgagtacagtggtgcaatctcactgcaacctccgccttccagttgcaagtgattctcctgcctcagcctcctgagtagctgggattacaggcacccgccaccacgcctggctaatttttgtatttttagtggagatggtgtttcaccatgttggccagactggtcttggactcctgacctcgtgatccacccaccttggcctcccaaagttctaggattacaggtgtgagccaccacgtccggccaatttttctcatttctatgcctcctatattaaggtctgtgttggcacagatgagtaactgccatgttctaggtcagttatacccaagcacttctggtggtttaaaatgtgattctgtaacttttttatttttatttttttgagataatttcactcttgttgcccaggctggagtgcaatggcgtgatcgctgctcaccgcaacctccgccttccaggttcaagcgattctcctgactcagcctctcaagtagctgggattacaagcatgcgccaccatgcccagcttattttgtgtttttagtagagacagggtttctccatgctggacaggctggtcttgaactcccgacgtcaggtgatctacctgcctcggcctcccaaagtgctgggattacaggcgtgagccaccacgcctggccaattatgtaattttttaaaaaggacatttctatcagggatatataccttcagaaataaggaaataggggaaaaaaagagcactataaaccacatgttttcatttctagtgcttcgctgtaagtggctaggttggtagaatcaaaaacaagggccagatgtatttaaggggtattcagatgccacctacatgcttattttgtctagaacagtgctgtctaatagaactttctgtgacgatggatattttgtagacttttgctgtccagtgtggtagccactaaccacatgtggctgttaagcccttgaaatatagctagtgtgactagaaagtattttattttaaatttacataggcacaagtggctagtggctactgtattgacattctgggtctaggactagaaccagtggtctgtaacaaaagtactttctctttactctattaaatctagaattrgccgggcatggtcgctcrtgcctgtrrtcccagcactttgggaggccaaggcaggcagatcacttgaggtcaggcgtttgagaccagcctggtcaacatggcgaaaccctgtctctacaaaaaacataaaaattagccaggtgtggtggtgggcacctgtaatctcagctacttgggaggctgaggcacaagaatcacttgaacttgggaggtggaggttgcagtgagccaagattgtgccactgcactcaagcctgggtgacgagtgaaactgtctccaaaaaaaaaaaaaaatctagaattcttggaagtacattatattgcccttcagaatagattccagttcctgttgtgctcacctttataattttaccataagttttacctattcgtaagttggcagttttagatagataacattctggtggtagctagggatttaccttttgtcatccttttcctgcacttctcttgaattcctttatagatgtacagttttgctttaaccactgaagattgctgtaaattataaagggtgtgatagaatccacatggctgtcaagaaggagatcttaccaaggacagttgactgactagtctcagattgtttcatatcatttatacttgggtaagagtaaactagataactgggcgtcgtggtgcacacctgtagtcccagccactctgaggcaggaggactgcttgtgcccagaagttcgaggctgcagtgtagctgtgattgtgctactgcactccagcctgggcaacagataaaggaaactccatctcttttaaaaaaaaaaaaagtggtctgggtgcggtaggtcatgcctgcaatcccagcactttgggaggccaaggcaggcagatcacctgaggtcaggagcttgagaccagcctggccaacatggtgaaaccccatctctaccaaaaatataaaaactagctgggcgtggtggcggcacctgtaattgcagctatttgagaggctgaggcaggagaatcgcttgaacctgggagatgggggttgcagtgagccaagaccgccccatcgcactccagcctgggcaacaatagtgaaactccgtctcaaaaagaaaaaaagtttccttagaatggaaaatattcattcatgagctcttttggcaatccgtcatcagtatattctgaaaaccaataagatgttgccaagttgggggcgagagctatgtaatgcaaggcatatgcctgatgaagtatacaaatacacctgaccagaaactttgtctcccacataagtctcttctaggcactgtcggggtacatactgagctgctgctttggctgtattttctgtgcctcagaataaccattgtcctggtgttcatatccttagagttcagtacaaaatgttggatatccatttaataggttccaggttatcttagttggagtttggggtatttgaaaacgtcatgccttcaggctatcatttccctcagaaagctaagtaaatttactgcattcatttctcaaagagtaaaagtgcaggttgtatgtgtctatgaacatttaaacatgttaaaatgttaaatttaacattttaaatttaaacatttaaatatgtctgtaacttgaacagtgtagtttcagaaaggaccactgggctagtgtaatgcagaaaatgctgggtctaggattaggagaaaattgtgtttagtgtgtatcaataaacagcccgtggacccaatctgaccagatgcctgtttttgtaaagaaaactttattgggcttggtgcagtggcttatgcctgtaatcccagcactttgggaggacagggcagatggatcacaaggtcaggagtttgagaccagcctgaccaacatggtgaaagcccgtctctactaaaatacaaaaattacctaggggtggggggcggtgggcacctgaaatccagctactcggaggctgaggcaggagaatcgcttcaacctgagaggcagaggttgcagtgagccaagatcacaccactgcactccagcttgggcaacagagcaagactccgtctcaagaaaaaaaactttattggatcacagtcacattcgttagtgtattgtttagggctgctttgggctacaacattagaggttagtggttgtgacaaagcctaaaatatttagtgtggcattttacagagtttctcagttctgtgtttagagctttgctttatcaatctgattaacacaacgttgtatttgtggagaatgggaataagcacctcaaaagattcactgaatgatgtgtgaatgcctgtaactggcaagcacagaaaaatttttcatatctatgtcaaattccttgaaagtcacatagtgaaaagtcactacttccaaggttagcaagaacctatttgtcgatattttctattctcaattgactcaatctgtgtgacatctgacacacttgactgctcttattttctcacttccctcagtttgttagtttcacattcacatagaatgaaacagacataaacatcgttatgtatgtgtagctgtaataatctcttgataacccacatacttcagcatgacgttttgcccaaattctagtccctgaacttaaattgctttgtagttataaagtgcgttcatatctcaattcatcctcagcacctcaaaaggcactggggacaggctcagaggttgttactgccaaaggtcacacagatacacttcctcgttagcagtaccacatgtactgacaccaacccttcctccgtgccttctaaaacgccacataaactgggtcatctcttttagcctctttacagaatgtacacactttgttaatagaaacagggctttctccaggcccatgaacttctcagccctcacaaatagagactgcttccacacagtccacaaaagaggccatgtagtcttggcatcttccaaatcatcactcttctctcacaggcagagctacttgtgtgaggtttctgacatctgcatggacctttggaccttttgctgtcatctgtgtacttctagaccattactcactgggcacttcacctggcttatgatctctactgcaacccttttttatttttaaaagttatcctggtaatagctgtatgcattcaaagaacctatccttaatgccactgtagcctcaattttttacttgattttaactcttctgagggctttcccatcattataatttagacttatcagtactccagaactactccacctctgaaattagaaatcccaatacaccagtctttgatcacaagctcatattgttccttgtctctcattcttatttctgttgtatctccttgaactcaccaaaacccctaggtcccgatcatactcttcagcctcccttcctcggccagcctctcagtgtatctcttccatcactgcattgcctacatcctctacctttgtcacttgtatttccttttgtggcatctgtcctgcaaacagcctgagaacagcccagcaatctttgcttccatacctgatctgaacaccgtaggagaaaatcacactgctgtccgtcagcaccactgtaaacttaaccgtctctgattcagctgaaccagcagaaaccttgcgcagctgtccttttatgtatccattcttatcccagtcttcattgttattttagatgttcatcatgctcctcatgattcttatccccactgcctttcttatagcagatggccttgcctcccatttcagatatgaattatttacttcctgactacgaggaaggtttctgctgtaccccatccttcactttgaatgttgttcttaattcagatatgtttcagaatggtcaatcacatcagaacagtcgctctacatattacaccccaacatggtcattctaacacccattctcaacccccttgtcctctgcctccctctcccataaaagttggaaggactacatgtctactttctttttagcccaggaactttgcatgggaagccacatttaaacaatataaattctggaaattaatattttctaattcagtttaacaaaattatagttgtctctacctgaattgggcatgtgtagtgcgtccagaccaagagatgatacatctttgcaatttggggatagcaggagaaatctgtagattttctaagtcacctgcactgagttggggcatgttgtgttgtcagtaagatgaaaacttctatacttgtttactggtgaatggtagaggaagacagcccaaggatctgagacctccactgacactgcataatggaaccttaggcacattaacctctctgtattttagtttcctcatctgtaaactggcactaattattttagcccttagggtggttttaaggattaaacaagagaatgtacttggcatgttgcctggcagtcagtaaacattcaaagattagctattcttgaactagatgggcaacaatttatcaaattgtttaacaattggacatattgcctgggagagagggtgctcactgagatgattcttccaagtgaagtgaacaggatggtttagtgggagagaagtgcctggaattagggatttgtattcctgactctggcccttaattctaaccattgactcatcaagtgatgtctcatacacttttagtgacctggaccaagaatcaattaagttcaacctccaccaacttcatttaccttgaaagcttttctaaggggggggtccaaggcttgtagtcaaatgtatgtatacactgatatgtatacattctcatcttctaagtgtgcctagtttctctagtaatctacgaaaggcatagtttttaatatcccatttactggtataatgccagcgctagtcaatttctcctgaatcttaaaatcaacatgaagagaaacaaattgagttgggaatatgtgcattagaggcagcttagagtgggaaatgtttaggtggttggctgcaaccctccactgttccatctcccaggaggatttattaggatgttccatccaggtcatagcaggttgccacctggagggcccttacctatgaagaactagtggttctgcctctcgtcctgtcacaatgccttgctaacttgtgtttagcaatgttcagtagttaccttgttagagttttgattctggaacattagcacttcctataattttttttttttttttttttgagatggagtcttgccctgttgcccaggctagggtgcagtggtgcaatctcagctcactgcaacctccacctcctgggttcaagcgattctcctgtctcagcctcccaagtagctgggattacaggcacaccaccatgcctggctaatttttgtatttttagtagagatggagtttcgccatgttggccaggctggtcttgaactcctgacctcaggtgatccacctgccttggcgtcccaaagtgctgggattacaagtgtgagccactgctcctggcccctcctgtaattctttttttctttttcttttttttttttttttttttttttttttgagacagagtctcgctcttttcgcccaggctggactgcagtggcgctatctcggctcactgcaagctccgcctcccgggttcacgccattctcctgcctcagcctcccaagtagctgggactacaggtgcctgccaccatgcccggctaattttttgtatttttagtagagatggggtttcaccgtgttagccaggatggtctcgatctcctgacctcgtgatcctcccgcctcggcctcccgaagtgctgggattacaggcatgagccaccgcacctgggcacctcctataattcttgaatggggcatatgtgatggtgataacaaaaaatcactgtgctagccggacaaacactgtatgttgagtacaaaggttagagttggtataggaagagacctatgggagagatttttaatttatgagtctcctgagttagactaggttaagatatttaaaaaaccagtgcttagtgggaagtgacagggccagcccatttcaccccctcctaacctggtatgtctcaaaataagaatgaaggagggttttttgtgcggtacctcaaggtcagggaaagattcatttaggctgagcatggtggcttatgcctgtaatcccaatgctatgggctgaaaaagaaggattacttgaggcaggagtttgagacaagcctggacaatacaacaagaccccacctctacagacaatttcttataaaattagccatgcatggtggcatgtgcctgtagccctagctacttgagaggctgaggcaggag

SEQ ID NO: 94574 - DNA, 22964 bp, Homo sapiens
  misc_feature (1)...(22964): n = A,T,C or G
ccaccatgtaagatgtgccttttgccttccaccatgattttgaggcttcttcagccacatggaactgtgagcccattaaacctctttttctttataaattacccagtcttgagtaataaaatagtggtttgtccacaacatcaatgaacgatgctgtcacttgtttgaaacgcttaccatttaagaggtttggataaacaacaacctaaaataaataagcactaagcaaactcagggctacataatccctgtggtgaggtaactgacaatgggtaccactgggacagtttactcttaaatcacctctatctacatgtgcccaagcagtgagatacttggttttaatcctaaaaaatcatggtgcacatttactcctgccttccaactgggctctaacgtcacctcctcagagaagccctcttttctgtgcttccactctgctttttttcagcatttagtagagcatcagtcaccatccatatctgggaacaatgattgtaagaaacagaaatccatttgcatgagctggagggaaaggagcacaccttatctctaataggcaaactcatgggcacgagaaataaatgagaggccatgagagaatggaaactgcagttacagaaaccaaaatgcctctttctggctctcagaagcccattttttttgagacacagtcttgctctgtcgcccaggctggagtgcagtcgtgcgatctcagctcactgcaagctccacctcccggggttcatgccattctcccacctcagcctcccaattagctgggactacaggcactcgccaccacacctggctaattttttatatttttagtagagacggggtttcaccatgcgagccaggatggtctcgatctcctgacctcgtgatccgcccgtcttggcctcccaaagtgctgggattataggcgtgagccaccgtgcccggcagcccatggtctttcctatcagccctgtggacttccttatctctgcttctctcactcacaaccaattttcccttcttgctggtggcccatcatggcagccagcagagcccaccaccagctgatcagtcagttactggatatcttggagtgggagggagggagggaggagagagggagagggagagagagagagagagagagagagagagagagagagagagagagagagaacgacaattgggcttctggccaaccaattgagtatagggaggggaagtaccatggtacaaatatggcgccaagacctgctttctagcatggccaatgagcagggaaattgagggaaggtacctgcaagcacagcagacatctcagaacatgctctctgttcttagttctctctcctgccttctcctagattgtaaatatcacaagacaatctagaatagtacctggctcaaaatatttgagaaagagaaaaaggaagggattggatcaaactctggacttcatggtttcctaaattcactctgcaagtttttgggttttttgttttttgagacagagtctcgctctgctgcccaggctggagtgcaatggcataatcttggctcactgcaacctccacctcccaggttcaagcaaatcccctgcctcagcctcctgagtagctgggattacaggcacgcactgctacaccagttaatttttgtatttttagtagagatggggtttcaccatgttggccaggctggtctcgaactcttgacctcgtgatccacccacatcggcctcccaaagtgctgggattacaggtgtgagccaccacgcctggctgactctgcaagtatttaagtgaatgaatgtcagtccctgagaatcagaagaaaggcattaaatctctgttaggtttaatcctggtcagcagctgtggggtgtcctgggtttgggatcagtgggatgaggaacaagcaggttctccaaaccaccacacagggaggggaggtgttaactaggccaaagatgatgggcggggtacgtgcttgggtttcaaacagcttatgccaggcctaaaaaccgacgctgaagcagaaactgtattaagcaaattgatgacacaatggagggggtccgaaagtttaatattgccaagaagaatacaaatattgatcatgcaatatgacattgttatcacaccatctcctgctacacgccaggtttcctttaccatgagatagaggagatttgtggatctgacctaaccctccaaattgtaaggtccctgagagtgggctcatgacattcatgttttataaatgtggcataaaggctcacactggctgccatgtggcccaatgccagttcgttgctgcattcagagaaccatcattccagcatgcaagcatacttaaaggcaattgaaatgtttaccgccgtccctcaagaccaacaccaaagaaaaattattttcaaaatgcatagcaacacttcttaaaatcttattttcccatctctttctctctaacacattgccaggagtttcccaggagcaaaactgtcaaaaagacccaggagcaaaatgattaatgacttcacagtatctgattctgatttagttggtttagagtggtgtccgtgcatacgtatattttaatatcttgctgggcacagtggcacacacctgtagtctcagctactcgggagactgaggcagaagaatcacttgagcccaggagtttgagtccagcctgggcaacatagcaagaccctgtctctgaaaaaaaaaaaaaaaagcaaaaagaaatctctctcagctgcagtcagggttgataactagttgatcaaataattgtggtagccaacctttgcaatggaccttaatattcccacctcctggtgttattcattgtggaatctgtcttagctagtcctcaattgggtctggtatgcaggccccaccttgagaggctagtcccacctcctaccccacacatggttttacacttactttcaagactggcctaaaaatgtaaaatgtacttgttttgaccttgtttccaatgaaacaactattctaaacactcatttaggatggttggggaaatttgaacactggctaaatattgaagatatttgcttccaaataacccagcttggtaatgagatgatggcggctgaggctggtgataggcacagagggcttcattatcaaatagaaacaagtcgaaaaaacagaatcttttccataataaaaatgtaaggtaaacacaaaaatgtattgagtgcataaaaagaatctatggtctcacagatattagcttataatttgaacatcaaaaataaaagtgatggccaagtgcagtggctgatgcctgtaatcccagaactttgggagactgaggtggatggatcactcgagcccaggaatttgggaccagcctgatcaacatagtgagacccccatctctaaaataaataaatataaataaaagtgactagaattgattatagaacatcaactctatttgagtctataaagattactggcaggggggggcaatggggagaaggagaaagagaatatatttgtgacctagattattttccttagttttgagagaatcttcgggtctcctgggtcttctagtccagtatttatatttattttatttattttttatttttttagatggagtctcactctgtcaccagactggagtgcagtggtgcgatctcgggccactgcaacttccgcctcccaggttcaatcgattctcctgtctcagctccccatgtagctgggactacaggtacctgccactgcacctggctaatttttgtatcttttgtagagacggtgtttcaccatattggtccaggctggtctcgaactcctgacctcaagtgatccacccaccttggcctcccaaaatacaaggattacaggcatgagccaccacaccctgcctattttccttagtattcaaagaacctttaggtcccctgggtgctctagcccagtatatctcaaactttgctgcactgaggaccttgtcgaaatgcaggttctcagctgggaggctcagtgggccagcaagtctgcattggtttaggaagctcaccctgagtagcaagtttcagtgaggaccaggcaggcccgtgcctgccaaccccctctcagctgggcttaactctggctctctcccgccagggttcctcccctcaaaataggagctattttcaaaaagtctcttggaaaaaaggccctgttttaaaatcggggtgtttaccacggggtttgaagacctttgcccagacccccgcaaccaacttagaactgacgtttttacttttgaaggccccactccacaccatattaaattcattaaaatcaaccgccatgacaggcgtatctcaggcatcacgccctcagaacggagttgcagctgaccacttgacaatgttgcaaagcattaaacatgcattcatttcagccttgcagttttcacatttaggagccaattgtcttaggtctaaagcattcatgtccaagcattgttatgggccccagacactatgcttcccagcctttatggcatctgcaatgttggttcccacccctgggttctggccggctagcccacaccacctcactgctcccccattcaagtgtgccttaggtgtgtggtttccagactcatctacactttaggatcacctgggattttttcagtgttccaaaacccaggtcacaccccaccccagaataattaaacctcaacctctggaatgggacatagcatctgttttttgttttttgttttcttcggtttttgagacagagcctcactctcttacccaggctggagtgcagtggcacaatcatagctcactacagcctccaactcctgggctcaagcaactttcaggtcaatgcagtaggtcagggcttcgaacatggagatacctgcagttatcttgcaccctgctctgagtttcaccctgagcctcactctcgtaggtggtgaagcatgaaatgcagggatagctgctttaaaacccagcacaaggctgggcgcactggctcacacctgtaattccagaactttgggaagccgaggtggacagatcacctaaggtcaggagttcaagaccggcctagccaacatggcaaaaacccatctctactaaaaatacaaaaattagctgtgcgtggtggtgcacgcctatagtcccagctactcgggaggctgaggcaggagaatcgcttgaacccaggaggcggaggctgcagtgagccaagatcgggccactgccatccaccctgggcaacagagcgagactgtgtcagaaaaaatgaaaaaccagcagcagcctgaagagcctgtgtattgcgtggggtactttgctgcccttgggcagaatctgcatccctcccagccagcaggcgctgcggaccgtctcctccctctccctccaggctcctgttttcccgctgtccccgctcctgctgcagcagtccctctgccctccgttccaagtgccaggccgcggccacctcagagcttgcaccagctgttgccactgcctggaacttgctcgtcctgcactcggcttctctcggctttagctggggtgtcaccctgagcgtcccctcccctccatcctgtccccagggacacacgctccaagagagcagttgccgagtgggccttcccgcctcttccatagagccagacagttggcgactgtcctcactgtaaaccctggttcacactggctcccctgggagggaggtggtttgggcccacgtgccctgcgttcttgctcagaatgggcgttagaaatgctgccatagcctgtgccactgcagtggaagcatttttaggaaacggcttatatcataagacaaacttcagatgcatggggccagaacgctgtgtccatctacatctttgctgggggatcgggtagcctggagtttgccctctgctgtgttggcttgaagctcataggaggcttaagacgggctctcgagcaaccaacgttctgtcctttgcggtagactgtgaagcatcctgtgtgtgtgaagcaccggccgtcagtcaagtatgcccggtkctttctctcagaactcatcaaaaaggtcagttatggggagtgtccgcccagtagccagacagcatagccacctgcgtgctggagcccccgtccttcccaggccctgggcctgctttgcaaaccccagcgtggcaggggcctaaccaggcaactggctgcagccgcgtgtgacccatgggagacaatgcaggatgggaagaaggggaggccagcgtctctccctcactctgcctcctggggtttctgccgcagctgctgctctggggccccagctcctagcatatggattctcattcctaccaggctggcccagcccacagcactggaaccctcacccacaccctctgtcctacccgccgaagggtttggagtttcctactcttgtctgtctctgggttgccccacgggcccctgttggaaggtttagctcttgccataactttggaactagttcctctggtgaattctccgcattgatcctgctggaatgtgctctttcctgactgatacaggatggattttattttttacttatttatttttttgagacagagtctcactgtgttgcccaggctggattacygtggcacagtctcggctccctgaaacctctgcctcctgggttcaagcaactctcgtacctagcctcctaagaagctgggactacaggcacatgccaccatgcctggataatttttgtatttttagtagagacagagtttcaccatgttggccaggctggtctcgaactcctgacctcaggtgatccacctgcctcggcctcccaatgtgctgggattacaggcatgagccaccgcacctggcctaggatggattttaaagatgggcccgaacatgcagcgtttgacataaggatgtcgagaggccattcctcagtaggcagtagcagacctgctgagtgaaagggccacacttttagcaagtaaacaatcccctgcttctccaatacctgctttctccctaatcctccccaaaagggtgcatctgtagtcaccagcaggtctgccctgtgycaccaggagagggcagcagtcacccagtgtatcttgctgctgccctgtgaatcttaggatggggccagccgtggagaagcagcctgctgacagccacagcctacagcatgggccgccctcacagttctgcctgggctcacttaaaagcaccttttgttttcctcctctctgtcatggtcatgtggcagctctcacggatccttgtctcctgccctagactacacctaacactaccctctcaacacctctcgttgaaggccctcccatccaggtttccctaccaagtgaattttttttttagagacaaggtctcttgcccaggctgtcctcgaactcctgggctcaagcagtcctcccatgtcagcctctagagtagctgggactattcggcacacaccaccaagcccaatgaagtgaatattttatatgccagctggccagtattacaccattccatcccaaatctcccctccaaacttggtgaaatcatctgaccatttttacagattagaacgaaagcaaacaagctctcactctgcctgcccccagcaggaggctgtccacacggagcctttggacgagctgtacgaggcgctggcggagaccctgatggccaaggagtccacccagggccaccggagctatttgctggtataagaagggcaccctcctccccctcacagcccagatacccttcctgcacagacaaagtgaaaacgtgggtgtgggttcaaatcctgactcacccattctgcagtcttagacatgaggtccgtcaaccttctttagcctcagtttccctgtctgtaaatcaagcacttcaacaacaacagcatgtctcatggggttgttgggcatttgtccaataggtgacacactctacctccttcacaaggacctggtgtccattcctcaaagaatacttgacaggtccgggtgtggtggctcacacctgtaatcccagcactttgggaggctgaggcgggtggatccgaggtcaggagttcaagaccagcctggccaatatggtgaaaccctgtctctactaaaaatacaaaaattaggccgggcgtggtggctcatgcctgtaatcccagcactttgggaggctgaggcaggtggatcacctgaggtcaggagtttgagaccagcctggccaacatggtgaaactctctttactaaaaatacaaaaattagcgggtgtggtagtgggtgcctctaatcccagctattcgggaggctgaggcaggagaatctcttgaacccaggaggaggaggttgtagtgagccaagatcacgccattgcactcctgcctgggcaacgagagtgaaactctgtctcaaaaaaaagtagaaaaatgagccagacatggtggcacatgcctgtagttgcacctacttgggcggctgaggcaggagaattgcttgaacccaggaggcagaggttgcagtgagccaagattgtgccactgactccagcctggggaacagagctcaaaaaaaataagataaaacatagatacagaaaaccacaaaggaaaaacatagcatattraatcatcacaaggcagccaccccttcatagccacacccggcccctggccaccactgacctgtgctctatcaccagaattccgttgtctcaggaatgttcaatgaatggaatcctgtgtggcctgagatgagtgtctttcatgccacatgacacccttgaggcccgtgcaagctgttggcatgtcaacagttagttgcttctcattgctgagtggcgattggtcctgtcatggtttattcagccatgtggtggatggctacttgtcttctaagccacttgccttctgatcgctggactgactctctcgccctctcttggtgcagccctcgggaggctcrgtcacactctctgagagcacagccatcatctcccacggcatcacaggcctggtcacatgagatgctgccctctaccttgcagaatgggccattgagaacccggcagccttctctcataggtgacctyggggtgcatggcagggcaccgaggcaggcttaccctggtgcagtcgcagacatggtcccctttcctcccgccaggactgtcctagagcttggcagtggcgccggcctcacaggcctggccatctgcaagatgtgcctcccccgggcatatatcttcagcgactgtcacagccgggtcctcaagaagctccgagggaatatccttctcaatggcctctcattagaggcagacatctctgccaacttagacaaccccagggtgacagtggcccagctggactgggatgtcgcgacagtccgtcagctctctgccatccagccagatgttgtcactgcagcaggtaatgcccagccccgggcaccctgtgcaggcggtgtccttgcagctctacccagctctgggctctgggaaaagggaacgatggacgctgttgggcatggayatgatggggcttccagaagagttactctgggcctccagggtgacatcaaaggacaggggtgcctcttaaggtgaccttacagccacagccctctttttggagacaggcatactcccattacagtcatcaccacatggctctgtcccagagccatgcctgtgtctttcagagaccacaggaggaaaacaaccacttctgggatgaggacagggcccttgagagaaggtggtgtttggctgggccaccraaaacccctcgcccctgccagcacactcagtctcctctcgggtcgaacagagctctgcctgtggtccttggtcccagccctgaaaaccacaggtccagcagtggccagggacacaggcmcacccctgcaagccagcagacaaatcggcagacgcctgaaacamgaagttcatggcagggtcaggctttgtgtcattcacagccctctagataggccgagaaccagagctcgttttttaaggaacaccagtgagtctggagattttttcttttgcttcggtcttttgcagctttctctactaagggttctcctttttcacccaagtaattgcctttccatctaatggcccaaatggtcaaatggcatctactagtctcatatgaccgctgcctctctggcctcgmccttctgctgaggtcagcatgacctggaactgtccgctggtcccyttcagtaatctgaagctttcaccgtagacgtgccgtattgcccagaagccaytgtgtcgctggtcggggtcctgcggaggctggctgcctaccgggagcaccaacgggctyctcaagtctatgtggcccttaccgtccgcaaccaagagacgtgccagctgttcaccaccgagctagctgagcccccacgcccacccgggcctgcatggtcccggagctgtccctgcgggactccagtggaagtgaaagaactgagggcagggtaaaagctaggaagccccacactcccacaccatgcggggaactagggcagaggccggtgagcagggtgggctcatggcgtgggggacttgmggcaggaggagggcagctcakcacagggagggaggatctgagcccagcagccctactgtgtgcttcagagcaagrttccctaagcccttgggcctyggtttcctcatctataaaatggaggtggcgrgaggggcagtcakggtcagggctggacaccgctgtggmctgcaggacgctggagcacaggctgtacaggcggatccaccatgccactgtcctgagcacccagttgatggaagacgagcagggtgactatagagtaggggaactggccccgtagtgggccagccactgtcctcagacctgacatttgtcagcccccagcacctgtgagagtgtgctatcattgtcccatctcaccgacaaagacactgggacacacagaggacaagcaacccccaagctcccacagactgtagcccggccacctggctctcgtgcctccacactacacccaagccccccattgccaccagcctctgccccagctccccctgagcacagcccctcttggcagccatgttcacagatgcacgtgcagcagcctctgcctgcacagagagacacgggtccaatgcctgtccacgtggggcagcccgttaactacagagccaacaaacaagccagcacacgaagacacactgggttccacgacagagtcccgcacaacctcgcacaggaggctggccgggtgcgaggctcgggcctgtcatcccagcactttaggaggctaaggcagggggacttcttgacaccaggagttcaagacctacctggaaaacatagtgggaccccatctccacaaaacgtacagaaactagtcgggcatggttgcgcaactacttgggaggctgaggtgggaggatggcttgagcccaggaggtggaggctgcagtgagccctgatctcacgactgcactctaggctgggcaacagagcaagaccctgtctcaaaaatgcaaaaaaaaaaaaaaaaaaaaaaaaaaggaagtctttcttcagatacttatgtgaaaaaatacctgcaatatctttgaagtgaaaaaaagagtgccaagcagcacacatagtataagccccaatccaccttttttttttttttttttttttgagacagagtctggctttgtattgcccaggctggagtgcagtggtgccatctcggcccactgcaacctcccacctcccaggttcaannnnnnnnnnnnnnnnnnnnctgctgcctcagcctccccaaagtgttaggattacaggcatgagctactgcacccaggccccatttttgttttaaaaataataataatcaccccacacatagttatgagtacctatattcccaactactcaggaggctgaggcgggaggatggcttaagcccaggagtttgtggcccccttgagcaacatagcaagacttcatctcaaaataaaattatcacaataatcattttcacataagtatacctataggggaaaacctagaatatatatatagcaggctcgtccaacctgcggcccaacacaaatctgtaaactttcttaaaacagtacgaggtttttttgtgattttttttttcttttagctcatcagctattgctagcattagtgtattttgtgtgtggcccaaggcgattcttcttcttccaatgtggtgcagggagaccaaaagattggatatccctgatatacacgttaacaggtgccatccttggatgacaggattatagagacttctacacgttcatgtctgtaatacttcatttttataaatacgcattttccactcgtaacaaaaaactgtgattgaaaatcatcccgggtcacagtgtctcacgcctgtaatcccaacactgttagaggctgaggctttgggaggctgacgtgagcggatcacttgaggtcaagagttcaagaccagcctggccaacacggtgaaaccccatctctactaaaaacacaaaaattagccaggtttggcggtgcacgcctataatcccagctactcgggagactgagacaggagaatcacttgaacctgggatgcattgcagtgagctgagattgcaccactgcactccagccttgggaacagagtaaaactctgtctaaaaaataataataaaagaggctgaggcaggagcatcacttgaggccatgcattcaggaccccatctctacaaaataaaaaaattactagcatggtggcactcacctgtcatcccagctactcaggaagtgggaggattgctagagcccaggagtcgaggctgtagtgagcaatgactgtgccactgcactccagcctgggtgacagaacaagatcgtatctcaaaaaaaaaaaaaaaaaaaagaatcattctggctaacagctcttcagatatctgtgcttatgagaacaccagccccttctaagctgtgtgtgtgtgtgtgtgtgtgtgtgtgtgtgatttttttttattttttgagatggagtctcactctgtcactcaggctcgagtgcagtggcacaatctcagctcactgcaaactccgcctcctgggttcaagcaattctcctgcctcagcctcccaagtagctgggattacaggcacctgccatcgtgcctgcctaatttttgtatttttgtatagatggggtttcaccatgttggccaggctggtctcgaactcctgatctcaagtgatccacctgccttggcctcccaaagtgttgggattacaggcgtgagccactgtgcctggctgctttctaagctttgtggagagtgggttgactgagcagccaggtagatgtgggttcagatctctgcgtctgtcccgctgtgccaagtgctggggcagacgcgggcagagactggacagcggcacggtgcctgctgctagccatttctatgcaaaaccagatttctggtcccatcctggaggccaattctaggcacctgggtgggcctgggaacctgtgaaccaagtaaactgacttggacaccccccgaccccgccaggcctgtcctagcagccccacacaatacgctcatgtcctgtccccaaactctgccatcctgaaacacatgtcctctgtttccaggcaggccaggatcagatgggaagtggaacctcgtcatgaccagaaactatttccctacgaagagcacttggagatggcaatgctgaacctcacactgtaggattcacacacgactccaacgggattgtgagaatcaagtcactcttgtgggaagagtttttatatgggaaagcagataaaactttcattggactggaatgtttggagaatgttaatttccaaatcaggaaccacaaactgccctctaataagacatcagctatctaagcgtgtgggtgctccctttctgccagcagttctggttctkaagaaaatcgccatcaatcagacatgaaaactctggctccaaaaacagcattttctytgtgcaaataaaaagtgtgtatcaagtatgatgttcccccaacgtggacacactckgttccccacaaagccaagcccgctgcagctgccacatccctggacacactcggttcctcacaaagccaagcccgctgcagctgccacatccgtggacacactcggttcttcacaaagccaagcccgctgcagctgccacatccctgggcttacggtgcagcaggtgcttttttcaagacaggaatcaaaatgttaggaacacggcagaaagatgacacctggagaccaaacgcaggatgaggagtactgcagaagtcacagaacagtaatacgctagcaggggcatggggcatgaagaacagaagaagagaggaagtgtttctgagcctccagaaaagaaatcagagccaagcacagcttcccgggtcacagaaccaattcattcaccaggcggcaccactgccatcatttcaccttctggccactgggaggygctgctcgaaagggtttgccctgagactccgagaagaagctgcgggaaggacagcaggggtccyggggttttagcctctggcccaggagttatgtgtccataaccaaagggagcacagtctgcacccagctctcatcccatccgagctgctgcgattaccgcaggttcttccggaactggtttagcttgcctgcaggatcaggaaagtttgagaaaagcatctgcaaaaaaataaagagcagagcttaactcatttcctgtccccaccccatcccaggtcaccacctggctgaccccatgtccccaacccaacaacaacccctcccaagttcttaactccctcacttggactcgagactcttcacaccccagcagcgctctgcctccaacttgacatcacgctttctggaaacttccccgtgtgtcccactttcccacacttggtgccctggagtacctcccggcctctacatgctgtatgttcccctgcaagcaccctccttttggcctctggccatgtcccacccatctgtgggtaacaagggggtgtctgtgttctttgcagccttgctaaactgtctgaatcaaggatcacaaactacagcctgcaggccaaatccagcccacagcctgtgtttgtaaataaagttttatttgaacagagccacaccccttaatcgacagatgatctgtggctactttcacaccacatgtcagtaccatggttctgacagagactgggggacccagtctaaatgacttccgacctggacctttactgaaaatcctgccaatcattctgttggcaagaatggtgtattacttttagcaataagaaacaagtaacctttgcagaattccacccatctttcaaggctggtcccagaagctccctttgcccgcccacctacgtgatcctgatcacttcctaaactgcagcctggcccacccggctccagcatcatttgtggagtgtcagctccataaatccagagggcaggtgggggtgtgtcctaactttcctgagcctactgtaccaaaacgggacagcagagtgggccggcctgtgacctctgctctctccctagcttttccgccagaccctacatggtcccaccctggctgtgggaagaagggatcagggagcgtggctcggagccagtctccagaaccctccccaccctggcgtggtggcagatgtggctacctgcagctgagctgccagttcctctgagtcctcaaagaccaggccattttcttcatgtttcaccagctcatttaaactgcagagagaaccaagggagcctgagagctgcctggagaagacaccagacccctggggtgcccacctgggctccacccccccaaccccatgctcaagccaggctgggggttggaacagggggtgtggtttccgggagctcrttcttagatttggcatctgaagggtataaaggcctgggggggtgcacatctaagtggccaaaccgatttgaggagggagccttaaggggggtttgtaccttctgtgctggatgctcttcaaggactgaagaattatttttgcatgtttttcttaattccatggccatggaacaagtaaagggaacaccctggggactggctcagcacataaaagatgacttttctagggcaccagatttgatcccgacattccctgagctcagctcacaggaggggctcacatcsctgaatcccatccatgagccggctcctgagcaggggccaagggctcagcttgtgctggggctactgcttctagaatctcctctaacagtgcccttccaaacacccgtctatgctgggtggagtgaggccacagcatgacactcattcaactgattcaaacccaccacgtgagcttggccaaaagggacatggtgggagagaaagaaacaaagaagaccatgtaagcctgcaggcaattcccgccaattctactcyaggagcaaaagccccgagtggagttctagtatttaagatgcttttttttcatattaggttggtgcaaaagtaattgccatctttaatggcaaaaaccgtgattacttttgtaccagcctaaatataacatgagctctaaatggaagcaactacttcagtgaggctcagcccagccacagtaaccgcagggctcctcctcgtggcctccagtgtgtgctggactgaccgaggggcagggcctcactgtgggcagctccctctgcactgcttccccctcagcggtggatctgtgaagctatccctagaaagattcgggttctgctcctaccacttgaagttcacggcacacgcaggcaaatagcacccgaacatgtccaccaccttcatgggcaggtccaggccactggagaacgtgtgcagacagacacccaggtccaccgaccctgctaggcaagaggggtgcggtcagagcactggtctctgccctgggaacacaaatcctcccagcacagtgaggcaacatcccctgaggggagtgaaaatcggataaggcacccgacagcaccaagcacaagtggcttaagccggccaagcagccacacggcctggctgggacatctgaaaatgtaagttgacactttttctacttaaccacaatttgttttttttttgttgtcattttgttttgttttgttttgagacagtctcactctgtcacccaggctggagtgcagtggcacaatctcagctcactgcaacctccacctcccaggttcacctcccgcatgtaatcccagcattttgggagcccaaggcgggcagatcacctgaggtcaggagttcaagaccaggctggccaacatggtgaaaccccatctctactaaaaaaaatacaaaattagcgaagcatcgtggcagctgtctgtaatcccagctactcaggaggctgaggcaggataatcgcttgaaccctggaaggcagaggttgcagtgagccaagatcgtgccattgcactccagcctgggctacaagagcgaaactctgtctcaaaataataataataataataacagtaataataataaaccacagcacacccaccacaaaccagctgtcagtgtgaaaacaaagcgaaacagcttatatttctgaagactagctggggccaggcgtgatgggtcacgcctggaatcccagcatttaggggggccaaggcgggaggatcacttgaggtcaggagttcaagaccagcctggccaacatggtgaaaccctgtttctactaaaaatacaaaaataagccaggtgttgtggcgggctcctgtaatcccgtaatctactcaggaggctgaggtgggagaatcgcttgaacccaggatgcagaggttgcatgaactgagatcgtgcactccagcctaggcaacggagcgagactgtctaaaacaaagactagctggagagtcctgccaggaaaaggccctcagcctccaactgctctgctcacttgaagctggaagatgcagctctagagacgcatcaggaccaagccacgactccccatttggaaaaatcaatcggggaaagagacggaggcaaaggagaaccatctcactgggagaagcgacgctgtttgacacatcgtccctgtacctcccaaagccactgccctcccacacctgggcaacagtgccccaaccccaggcccagccctcctgcaggaaggaagaggactgaatggagggcgtggcaggctgaaaggacatggcctcctcaaaccccttggtaaagggcctctggggccacctggcagggaggggctggcacaccaggaagtagcctcctcccgggagttcagccagagcccaggtcctgtccccaagtggcctccagagccaccttttcagaaaaagtacatcccgcccacctctgttccccctgcttaaggccccgcctcctccctgagcctcctgctggcctctcacctagaagcaggggctagtcctcggcctccagccaaggggtgcagacctggatgtgctggaaatgcttctggtggatgaggcagctgtaatactccgtcagaggccctttgccttcacagagaagagcagatactgccatggacccgtctctgaccctaccaagtggccccaggcccaagacactccccgctaggagggatccctttcccagaagctccacccctcggcagctccagtcaggccccatccgggcccttcgggaagcatcccaggagccccgagacccgcaggggtgtgtgcaccctgacccctgacgcacagccctgcacttgcagccagctggcctcgggctgcaaacatggcggggtaagcaccggcctggcacccgaccccccactgggtggacccagccttttgtctgtgttgtgcacaggggacacgaggactccccctgccctgccacagcctccagagcacatggcgcgggctccaaaccactcctgggagcctagaggccagaggagggaggagagcaggaccagcagctggcccagaccccgcctcttcccacaccacttccgcttttctccctcctcactgagtcaccttgaaagggctcagcagcagtaactgtggcacaggggctcttccgtttgaaaaattaaaagaggcttggttaaggcaccaatgacatggccaggcacagtggttcgtgcctataattcgagcatattgggaggccaaggtgggtggatcacctgaggtcaggagttcaagaccagcctggccaacatggtgaaacctgtttctactaaaaatacaaaagttagctgggtgtggtgggcccctgtagtcccagctactcgggaggctaaggcatgagaattgcttgaatgtgagaggcggaggttgcagtgagccaagatcacaccactgcaccccagcctgggcgacagagactctgtctcaaaaaaaaaaaaaaaaagaaaaaaagacactaatgatgtaacaacaacaacaaaaagatgcttggaaactactgaaaaagtagaaagcttggtatctacagattctaatctgggctccctgccctgctgtgaaatcctctgagccacagtttcccccacgtcaagcagtataagaccctatgcagagagctgcagtgaagattaaggagacaagatcgtgggaagcacagggtaaaggctgcgtgcccctccccctccaccatcccccaatcaaacagacacccagggtcccaggcggtacctgttatacagacgagagaaggaaggttgtgtccatcaagagtcagttgctcaaactctgtgtttaaaaaaagaaacaattctacatggaatttctgatagaatttctttttttgtttgtttttctgacagactcttgctctgtcacccaggctggaatgcagtggcatgatctcagctcactgcaacctctgcctcctgggttcaagtaattctcatgcatcagcctcccaagtagctgggattacaggcgcccaccaccatacccagctaatttttgtatttttagtagagacaggttttgccatgttggcctcaaactcctgaactcaggtgatctgcctgcctcagcctcccagagttctaggattacaggtgtgagccaccatgcccattcagaaaaaaagttttaaataaacaatagccagagtcacctggtcagttggagaaagagcactgctcttgtggggaggccaccagcctctgtgagatactctcctggaggaggcatttcagcctgagggcctggtcactcaatgacccaactggggattcagggcagcccacctccaccacctccgctgtccccaggctgccccacccagtggcccgggacaggaacatgctgcaggccaggcaagcagctcacagctcagtggcccccgacaagcccagagctcctcaccacagctacacccctactttctaaagctgccagcaggatggagaagtcttcgtcctctatgagaagagaattgaatgtcaggggcctgtttctagacacccctcttccagctcacacgccctccccttctcattgagactgtggcagggtgggggcatgcaggactggcaggggtgaggagaatacagattggccaggtgcccgtcacaccaagcccaagtgttccaggggtcgtgcagacctgtccagcctgtgctgctgaccagcagggctggccactcgcagagacacatcaccagcccrctcccagcatcccgctccatgaaggccgacggctccgtggctggttcctcaggttctaaactgaaagagcaggaaaaaagcctgtgagaggccacagagcaggcccaggacccaggacaggcttctcctgccatggcaaggcctgcaggctcccaaaggttggggtgcccggccacatcagcagcaccaggccacccctgccatcgaggcctgggcttcctttctctaatattgttgctgggtgctaaggttacaacagcaaacaagactgactcattccttttctccgtgggacttactgtcttatcatcccctggactcaatatgagggtgcagggacgccctcccacaccaccccagcttacccaggggcacaccttagggtgtgtggatctgcacaaaggtccctccttagccccgtgagacaccccaggggacccacaggtccacagatcctgccacaggcctgggaacccactggcaggagagtaagacagcacaggggtccacaaacgtttcttaaagggccagagagtaaatacttcaggctttgcaggccacgggttctctgttgcaaaacacgattctgctattgtagctcaaaggcggctgtagacaactcagaaggcaatgagtgtgttgtgtcccaatgaaacttgacttacmaaagcaggagactggccggttgccttagtatgccaacccctggatgagtgtgttcccaggtctgcagtgagaaggggagaggccagggcagtggtgagcaggagagaaagcagctgaggatgggaggcctaccgggccctgaacggagagtgcatgccgcccagcttcatgaagagcctgtgctgcaggtccagaggtgtccctttaaagaaagatgccggcttgtcatagacggtcacagccctgcaatgaaatcatggcagggctattgggagggctgaagaaaggcctcaggaatagaggactcagagactccaggaaaagaaggacgcttggggaatccaagtctcagacgatgacaagaagaagccttgcaatcacttgggaatgcatagagacatcctaggaccaaaactgcctggcccccgtggctggctgggaaagaaactctgccccctcctctcccggcttcctcaaattttcccataatgttgccaagcattagtccagcgtggaggctactttctgctcaaaccactcatttgggtcccgcacccaatgtcacccatcctcagtaaaacaacctttatttccttcttcctggtttccagaaagttcccctaaagccctgaggaatcactgaatgaaaggggctttttacaaacaggaaacttaagtggcgtgcctatacgcagcatggattgcaccaggccaggtctaagataaaaccagactgtggacaacaggacagataagacccacgtggctctgcactgccggggtctgttagtgtgtggaggaatgtcttagtctgttgctcctgtggatgttgctaaagcacgaaccaggagttttcatccttttttttttttcttttgagacggagtctcgctctgtcacccaggctggagtgcagtggcgcgatctcggctcactgcaagccccgcctcccgggttcatgccattctccttcctcagcctctggagtagctgggactacaggtgctcaccaccacgccggctaattttttgtatttttagtagagacgaggtttcaccgtgttaacaaggatggtctcgatctcctgacctcgtgatccgcccgtcttggcctcccaaagtgctgggattataggcgtgagccaccgtgcccggccgtcttcatccttagaaagcagttagacagacacctgagaaccaatcccaaactgcagccttccacagaactttctggaaccttctggaatgcaactcattactgccagagggtcttggatgagagtctactctcaaccatttgtcttcaaagagaatacccacatattctctttccatggaaaggtaagttattagagtttatgcagtctggtatattaattgacagctttaaagaatgtcacgtttacgattcagtctcacagactgggttaaaaaggcaatgttgactattaagttataaattactataatgatcattgttattattcaagcaagctgtgagaaatgagcattatctcacaatatctgcattttagtgaagctg

SEQ ID NO: 94575 - DNA, 137456 bp, Homo sapiens
  misc_feature (1)...(137456): n = A,T,C or G
tcaaaaataaaaaatgaaattatgtaaaaagtagaattattctacagtgacagaatgcaaacaagtagttacctaggaccagaagtagttggggggaggaagggcttgagaatactttttgccgtgttggaaatgttctgtatcatgattgtggtaatagttacactggtgtattcatttgttaaaatttattgaactgtaccattaaaatgaggttagtttagtgtatataaacaatacctcattcaggtcaattaaaaaagagtattgcaaaaataaaaataaaaagtctaggcatggtggctcatacctgtaaatcccagtgttttgggaggccaaggcaggaaggcctgaagttcaagaccagcctgggcaaaatagtgagaccctgtgtctataaaaatattttaaaaataaaaacaaagagtatcagtaaaggccaggtgcggtggctcactcctgtaatcccagcactttgggaggccaaggtgggcagatcacctgaggtcaggagttcaagagcagcctggtcaacttggtgaaaccctgtctttactaaaaatattttttaaaaaagaccatcacaagaaataatttccttcataagatataactgctttaagttatatcttatggcatgggaagcccttaagactgatatacctacttactttgttcggtacttataggaaggtaaacaggagaggggaacatcagaagaggagaggactgcctcatgttggtatttcactccttcaaaggaattcttaaggaagtgcagattgtcctaaggggcactgctctctatgctatctgagttttgggctttgaccagaaggggagcatgagaatgaggagaatactaaagagggctaagtaacaagcacttgggtgataggatcatttgtacaccaagcctcagtgacacgcaatttacacatgcaacaaacctgcacaggtattccctgaacctaaaataaaagtagaaaaagagaaaaaaaaaaaagaaacaagtgaagcagcattcaaatgagtaatggaagtgaagcaaaccccacctctttcacaagtacaggtgaaataggaaacttttaaagtgcaagggaaaataggttggggcagtttctcagcttcagcattaatgccatttggacctgatcattccttgttttttgagtggagtgatggggctgtcttgtgcactgtaggatgtttagcaccctctgtcacatctacccactagatgccaatggaacatccaacctacccccatgaaaaatgtcgtaagccattgccaaaatcccctgggatatgaaatggtcccaagttgagaacaacaggattagtgtatttgttatctatttctggatagatataaattatctcccaaatttagtgacttaaaacaataagcacttattttaccgctatagtttctatgggttaagcatttgagagtaactgagttgggtggttctggttcaaggtctttgatgaggctgcagtcaagacgcaatcatctgaaggcttgacttaggctgaaggatccacttctaagatgtctcactcacgtggtgatggcagcaggcctcagactctggtggttgttggcaggatgtctcagttccttgccatgtgggtctctacacagggcagcttcctgtgtctttgccatatggcaactgagaatgatctgaaagagagtgggagaggctccatgatgcctttttatggcctggtcttggaagtgacacactgtcacttttgctatatctgttaacaacaagtcactaattacagcctacattccttttggaagagaattaggcctcactggtttatttttttttaattttatttatttttttttttttgagagggagtcttgctctgttgcctaggatggagtgaagtggtgccatcttggctcactgcaacctctgcctcctggttttttgtttttattatttttgagacagagtcttgctctcactctgtcacccaggctggagtgcaatcatgatgccctcatgactcactgcagccttgacttcctgggctcaagtgaccctcccacctcagcctccagagtagctgggattacaggtgcacaccaccatgcccagataagtttttgatttttagtagagatgaggtctcactacgttgtccatgctggtctcgaacccctgggctcaagcaatcttctcacattggcctcccaaagtcctgggattacaggcatgaaccactgtgcctggctaggcttcactttctgagggcagaagtatcaaaatatttgtagacatattttattaagaaatttaaaaaaattattcttggaaatataatacagacagggtgtattagtctgttctcatgctgctaatagagacatacttgagactgggtaatttataaaggaaagaggtttaattgactcatagttcagcatggctggggaggcctcaggaaacttacaatcatggcagaaggggaggcaagcacatccttcttcacatggtggcagcaaggagaagtgctgagcaaaagggggaaaagccccttataaaaccatcagatcttgtgagaactcactcactatcaccagaacagcatgagagtaaccgcccccatgattaaattacctgacactgggtccctcccacaacacgtggatattatgggaactacaattcaagacgagattagggttagggatggtggctcatgcctgtaatcacagcactttgggaggtcgaggcaggagggtcacttgagatcaggagttcaagatcagcctggccaacatggtgaaaccccgtctctactaaaaattaataaaaaaattagctaggcgtggtagcatgtgcctgtaatcccaactactcgggaggctgaggcaagagaatcacttgaacccaggagtggaggttgcagtgagccaagatcacaccactgcactccagcctggatgacagagcaatactccatctcaaaaaaaaaaaaaaaaagatgagatttgcgtggggacacagccaaaccatatcacagggtttgtcatgttggtcaggccggtatcaaacacctggccttaagtgatccacctgctttgggctctcaaagtgttgggattacaggtgtgagccacagtgcccggcctgtagacctattttaaaaccactacagttagagaacaattttttaaacaaatggtttgggggaataccatgagctatttttaaaggaataaaagttagattatcattgcaaaataaatccaagaaaattaaattatttaatgaaaaaagtaaaatagtcaaacaagtagaaaaaagtaaagacagatgaattatatgatctcaggatgggaaagatgtatgaagtaaaaaacaatggaagaatacaaaaatggaaaagatcaatagttttacaaaggactaatatctacattgtgtgaagcacccttttgtgaaatacctcagtaagaaaatggacaaaggacaaacaataagctaccatacatacacatatgaaaacataccatgatgatttgggcacatggaagaaggacaatcacatactgtcatgtagtgttgtgggaaaattgataaccattatgacaatcatttcttgattatgtgccatgctcatgtgttaagtagctctatgcgtgttatttatagcaatttatatatattttttaatacaacatgtggaagcactatattaattttctagttgagacacaattagattaagcaattggccaaatctctcagctcataggcagcaggagggtcaggttatccattaggcacagtagacacagtgcctcaggcttataacactttcgggggcccataaaaatgttttaatttcttttaaaatcagaaggcaaaaaattgaatatttaggtcaaagaaaatattttaatgtataatgttaatatctttttcttcataccaatgcagtaataaaatatattttgtagtattattttatggaagatgaggcccacacaggtataagcacctagggcctgtgaaagtcagaatgtggcactgggtggcagagctgtgttttgatgctgggcgatgtgatacctgagcctatgctctttctggaaggtagttgccaatatgtttcaaaagggctaaacttgttcatacttttttattacttttaataatttatctaagacagttaataaggacatgaacaatggttatggaatactatttataatattgttcatttgaaaccaaacagtcaataacaaaaggctggttcaatattgggtgtcagcttgaggactaggtgagtactaagagcttctgaacggggaggaaattgagcaatgaggggagctgaaagtgagacacagagcaggaagaggaggcctgcatgcattctggagaaggagtccagatccctgctggggaatacctacggaatttctgaggacatgtttgtaagcacattattgcatctatttaaagggaccagacagcaaaagcaaaaagatgaagaaaatcttagtacatgtttaaagcagagatgagtgggcacatatggggcactgtgaagagtttttcataacaggagagatagagcatgtgagcatcaaaggaaccttgaatatcacgttaatctttgtcaggagagcttcgaaaagccaaagaatgattttaagcagtggaatgacacagatgtatattttcgaatgatctttgtggatataatgtgcaccaatttcaactatgaagccagaggacaagaactaatgcatggaggtaggcgggaatgtgcattgttcagtcaagagatacttgttgaattctgtacacactcatgaagtgttggggttgtttttggtacacagttctttcaaaaagctcagttaaaatggaaggggagagagaaccagaggttttaaaatcaagggaaaatttaggacctaatcttaaaacgtgattatgctgaggagttgtaggcagtggagagggtgaagttaaagatgtgccaaggaccgcccacagtggggagcaggcagtggaggagcagggacatctagcctccgagatagaaggaaaactagtaagtctgggtgtggacgtagatataatctatgggggttggtcaggtggttgggcaaaagctgtagaaatccatgcctgaaggcttctgcttctctgaagtagaaaccgggtcacctggtaagcaatgtggtcccactgacttctatttgcacattggcctttcttctaaaagcaatacacataaccaacagtacttttctaaactagttgacttttctgtaaaatgcagacagtagacactactttgtcagattgttgtgtgcgttaattgtgcggacacgtgtactcggtcaataagtatctgctttatcaccgggctgatgtgagtgaggactaggtggtggggcttccacagatgaacgttttgattaataaaaaatggactgaaagtcttcgggtatgaccaatggctaaatgcaattatttactcttgcaatgtgttcgaggtcacccagctaggtcaaggagtatttatggacagcctacttttgcccccggaccttaagaagtcctgctccgggatcagccgccgaccggaaagtcaaattagcagtgcccagcgcgagcttagagcagcctcttcccaaatctcagcggcggccccgccccttccacacgttcaggccccgcccctccctactattggctgtccgtccccctccgctagactgctcggaagacccggaggagcggagttttcctaaggcagcatccgagcgccctcgctgcgcatgctcgggggaggcggattccgggtccggagttggaggctttgggcggccgcggcgtagcgcgcggtgccggggccggcggggaggcgcgcgcttagggcgcggcgccggcgacgcggccacgcggcgcgctcccgaggaagggaggtgtggggtcggctgggggtggcgcgtggacggggtgggggtggggggagggtcgggtgtcggcgagctccgcgtgcgggttccgagtggctgctggcggcctgggctgccggggccgacgcctgggtggctgctgccgccgcgcctgctgcgagatggcgatcttgggcgcggaagggtgagggcgcccgccgcaaggaggaggtgccgctgccgtggccgcccgcgctgccgggagccgacagcttcgcgccgggtaaggacggcgcggcgcggggctgggggtgcgaatgggcagggcgggagggggcacgggccctgagccttggccgcggtgctgggcgcccggcgccgtccgcccccgggctggaccctcctaggacccgtcgggggacggtccgccctaccttggctaccttctccagcccgggagtcgggagttttctggggtggggtcacgggtcttgcccggagttcgccctggcaaaggcctgtgccagtgatcctggagcggagcgaagtgtttccgtgactctgcagccgcagttcttaggcttccttagccttctcttcgccttcctccacctttccctaacacctccctgaaaacacaaatacatggactcattgcccgttccctgactttcaccccaatttcagcgttgcaaaccaaggactccagccttggaacgtctttttctgacatgtttttatcactctccgttcttcaccgactctgcagctccccatcccccgcccccccagcgcaacccccacctccaccttttgtgacctggtaggttccagtgaccttgcagattttaccagtccttatcttgtctgtgacttacagactctcctttcatcttcgtgttctttttttaaaaaaatttaattttgtagtttgccccttacctttacgacctttaaatgatcagtcttgttcacagtcctttctttgctctgccgatttggagttttctctgctgtggtaaatatatgaaaccttcattaccaaagaagagtagtgtctgttataattttgacatttttactctttcagaataaaatattttccaggggcttgattttgccttctttttctatttgataagtttaamaaatttttttctgtgtgtgtgtaggttaatgtggaacaagattttgtgtttctgctttaaaatgttactggtaatagtagtgggaaaaaaaatcatgtccaaaattatctttgttttccccgtttggtgtttttacctgaaatagttggtttacagttacctgcattttttttttttaacaagagttcatgtttatgtgtaaatccactttacctgcctcaccaaatctgtgtgtattatacaagcaaaatgcaccttttaaagaagaaagtcgttcttttattgtgtgacttgtttttagccatcaagtagtaaattagctgcractagaaatgatcatttttcataaatggttagtattttaaaaaatggaaagtgtagtggccaagtattgggagctactcagattgagaattgtaaagtatgtggaatagttctttgggacatagcttatcaacattttcagatagttcttaccttaaaatgtgaaactgctggtaagatctacatcagggttttgaaaagcaataattatgagctaccggcataatacaggatgtcgcagataaagtttctgccttcaaagagatggtaatctttgctgtttaccccacggtggctgaaatttcctttacttccttgtacagttgttaagcatttactgcataattgtgggaggtattttgggaaatacaaagatgaaccgattagcaatttctgccttcacactaattaggtagatagtgctatacacaaatgccttatttgtcttttaatatataagtttcataaatggtaccaaaatcctctcagaagtcaacttcaaagagagtagagctcagatcttacttggcaaggtagggataagagggttagtttgtagagcttctggcttctgaaatcgtggttttgaaggacgattatgactttggataggcaggaaaggtaatcctagcagagaggtatctctaagagagcacagagttcctgtttggggaaaggcaggtaattatgtttgggtggaacataaacttatttgtaccaggataaagggtgataaaacttgaagtaaaaatttggaccagtttatgggttgtttttaatgccagacttatgaccttggatttacccggtggtggggcttccacagatgattttgaattgggagtgaaacaatttgaacactttgtttcagaaggattagtgggatagaggtctgtagtgtgaactgaggtagggagaccctggaggtagaaagacctcccagttgttgtagtcatggatagtgaggatctgagctgtggtgcacgcgaatggaaaggaagaaaggaagtcgaatagccaaaatttgatgagagggcaaatgaaagtaaaaataactgattctgatccaggttggttgggagaacagtggtaccattttgagcaagatcatgaagctttaccctcagcatatgtgtgctactttacaactttttggagattactaattcttggtaaaatgctggcctggaaaatttccatatgcgcctatgctttgtggatataattttaggggagtccatggaacacctgaaagtcatccatgacactcatctcagaatttcttggagctttttttattttcgaggcaggatttctttcactcctgtccctgtggctggagtgcagtggcgccttctgggctcattgcaacctccgcctcccaggctcaagagattctcctgcctcagtctcccgaatagcttgaactacaggcgcttgccaccacacccggctaatttttgtattttttttttagagatggggtctcactattttgcccaggctcgtgttgaactcctgagctcaagtgatcagcttgccttggccttcctaagtgctgggattacagcgtaagccaccctgccgggcctactgggagctttttaaaacagtagaaccttcaggttcttctgtgtactgataagaactcttactgtagagatatgctgtatatatacagaaacacaatattacatttgtgttgtggtttacagtttacagagaattttgactaatgttatttgctattatattacacaataaactattcctggagtttaaatgatttgcctgaagcatcattcagctggtgggtaaagtggaatcaggagattgttgacaatgatggtgttctttcatgtatgaagataatgcagtggctttaccatcaattaaatatagttactgcctttaaatgaccttgtcagtaagactagatgatcccacaagattccttctagtttttaacattttgtgattctcgagtcctagactttcatcagagtatctactctccttgtttaatatgtgcatgagagctggtgagtctgagggatgaattgggtagagaagagcagttagcaatatcagatcattcatttggattgttactttctttgtatgtctcactttgggctggggagtagggaggagagaggtgatgtaagtgaaataagaaactttaagaactttattgggaggctgaggcaggaggatggtgtgaacccgggaggcggagcttgtagtgagccgagattgcgccactacactccagcctgggcaacagagcgagactctgtctcaaaaaaaaagaactttatcttctctgttcatttataccttcagaatattcttttctttcaggaagcctttatcaaataaaaatggagacttcacaatgtaaatgaagattcctactcaattttttttgggtggattaagtagctagctagtacggttaaagtgtagtgcgattggtaaacagttgacttttctgcacctgtaagattatctccctggtaataggtaatcatagcatgttattacatgttaataaactttgatttcataattattagaaagactgttgttttttactctttgtataaaaatatgatacaattataatgagcattggaaaatccaataaattgccctttatagtggtatccaaggaactagttactaatacttaatggaggaaaaatgataaaaacatacacagatgaattttattgtttttgctggcattaagaattgtactataccttatgttagtatagcatttcacatttgtaaataataactatatttatcatttggttctcatgacaactgataagttggtgtgttaggaagtaataactgctttatattttattttattttattttatttatttatttttgagacagggtcttgctctgttgcccaggctggagttcagtggcacagtcatggctaaactgaagcctagacctcagcctcccaagtacttgggactacaggtgtatgtcatgacacccagctaaatttttaaaattttttatagagatggggtcttgctgtgtttcctcaggctggcctcgaactcctggactcgtggccctcccaccatggccttccaaagtgctggaattacaggcgtgagccatcgcttccagccaatcattgctttttggatgaatatgctgaggctaaaaaaaaagtttaaaaagttaaatttccaaagtatgtggctagttagtggccacaattagaactacaactaaaacccttatttttgttcctatgtcagtattcttttcccaccagacttcttactcttcatgtacaatggaacatcattagttaagagctgtatgtgaaggatttgaatttacctgtttggaatgtgttaaacttttgtaccgtgtagaggtaaacttgtcagttttttcctttgtgttaaaatggtaatctcactgcagtggctattggtaggtgatatttaaatttgtaagcattgtaccacagaatagttattctcctgtcaaggataaagcaaaagttgatttcttatctggaaaagtacattggtgaaatgtagatatttatttttttgaaaattttgaatttaattctgttgcttttacagatgaagtttgtgtttcccttttataaaagcttagtcttcaaaaatttacattttttgaggatataaatgaggatctaatttccaaaatatatatagattgggtatccctaattcaaagtttgaaatgctccaaaatgggaaactttgagccacctacattactcaacagaaacattcactggagtatttcagattttggatatttggattagggatactcaacctgtatcatgatattttattatttttgtattagatcataagctctaccattgaaaaaaacccaaagatattaaaaagccctccttagtggatgcttcaattcatacatttaaacaacttttttagggaatgtataatgtaaaaccatacgtcagatggtttttaagttataaggaagactagcatggtttttaagttataaggaagagtagcatttgttgatttagtcttgacatttcttttttctttttttttttgagacggagtttccctcttgctgcccaggctggagtgcaatggcgcaatcttggctcactgcagcttccgcctcctgggttcaagagattctcctgcctcagcctcccaagtagttgggattgcaggcatgcaccaccacacctggctaattttgtatttttagtagagacggggtttctccatgttggtcaggctggtcttgaactccagaccacaggtgatctgcccgcctcagcctcccaaagtattgggattacaggcatgagccaccacgcctggccgtcttgacatttcttaaatctacagttcactcacagcacatactggcgtacctactatgtgccagacatatttctaggtgctgggagtacagtgttgagatgacagatatgaagcctttcctcttggaacctggagtttagtggaatcactaacattaacaagggcatagaactttatcttctcaggttgtaattttgcggagtgtaattaattatacctctcctttttctggggtttgaacaaattatgcagaacacacaaggaaccaggtgagtgttgtttcagttatgtactgctgtgtagcaaacagccctaaaccaagtgacttaaaacaaccattttctttgttacagttttgctttcctgggttgggctcagttgggcaggttttgctggtgatcactctaatggctgcttttctctccaagtagcctttccagcagagttgctggccttacctggtagctgatggcttagggctcacaagagtacaaaacagaagcaaccagatctttttttttgagagggagtctcactctgtcacccaggctggagtgcagtggctcagtcttggctcactgcaacctccacctcccaggttcaagcaattctcctgcctcagcttcccgagtagctgggattacaggcgtgcaccaccatgcccagctaatttttgtattagtagagatggggtttcaccatgttggacaggctagtctggaactcctgagctcaggtgatctgtccgcctcggcctcccagagtgctgggattacaggcgtgagccaccgtgcctggtctgcaaccagatcttcttaaggtttagacttgtaagggatacagtatcatttctgccttattatactggttaaagcaagtcacaaatctagcccaggttcaagggtacaaatgtgtgaatccatttggggccacccatgtaacagattaccataaattttatttaagtataacatcagctttactataccaaaacaggacttacggaaaactgttttggaagctgaagcttaggcagcttactactttccgcaaatctggattttgagtctgagcatgccacagggaaagctgagtctaaaaagtgcaaatgacagcacatctggcttactacgcaaatgggaatacctagcactctccttggttagaaaagaggagaacatttgtggcctctgaggtttttcctagtgtgccaccataatagggtaggattgacttgccttctgcttgagggcagtgggatctaacaaagtacaggacccaagagtccatgctgcttggaagtagtgatttacccgatctcgtgaattggaacagacagcatccyatgcagaaaatgggccacagatgggcagagatcgattccctctgcccttgtgattggatttgagacctaggggagaagggtttcttgactatcactctggccttgaccagagtgagcaacctgtcccccacgcgctccaagccccaatggcattttctgtttgcagtgtcttgaaaaagcttgggataagctactcttccttggagaggtgtcattatagtggagagaattctctttccttctagagactggaatggtaatcctctcttatggaaatacaatgaataaggtgctgcttctcctttccaagaacaggtagattcattgattgctatctgggtttttctcgcattatcacttaaccttatccactatcgctttattttagtcttagcagtattttttgtttgtttgtttttagttcaagttggctgctaagtaatgccatggttaaaggtgaaatgaagaaaatgagtgtttagtttttattacattatagcttctgagtggagtagtgaatgcatttcattttaagaatttaggttattagtgcatagctgcgaagcatttttgaagcatttcatgtacactaaaaaacgggcccctgcatcctratgcaaatctctttgcaaatttctgaaaatagtacattggctgttgcggggaggagtttggtaattggatgtactgagaaacatgatttatagaaataggaaaggccagggcacaaagaagggcacggatagagttacatgaaggtgcttcttgatggctgtcctccctaccctaaattatttgggtagttaaaaaatatcctagcattaacagaatgtaggtatgatagccttttaggaaacaaggaaaacaagttcttttgatagctgttcagtatactcataaatctgattgactgggctgggtggaagctgactgttgagtcctgacttgaaattaggatactgtggttacacattagccccarcttgccaagatgtcctactttttgtctgtgtttagttagactggggaggagaattagttaaatgaacctgttttgtataaagtaggatattctttaccttagaagtaaacaaactagattgttcttctctttttaagtttttaacggtagaggcacttttggcatacaggttaagagtcacagtttaaagtcaggcagacctgacttctggtagtattgcttaatggcaggattgcctcagtttcttcttttgtaaaatgtaaagaataccatccttaatggatttttgtaaggattaattgaaataatgtttataaagcagaaagcatggtggctagaacgtaagcccttaaatcatgtttattgctcgtaattcagtattatgaagttgaaaattcaaacaagtattcactttgctgtgagctactcatttctcaaagacagttctagcttcgttttggcatgggcagagctccttatcaaatttccacccccagcttttttttgagacagggtctccgacagctctgtctcccaggctagagagcaatagtgtgatcatggttcatagcaggcttgacctcgggggctcaagcaatcctcccacctcagccccacaagtagctgggactacagttacgcactaacatgctcagctagtttttttttttttttagtagagatgttgcccaggctggtcttgaattcctgggctcaagtgatcccccctacctcgacctcccatagtgctgggatttacaggcatgagccaccaggcctggccaaataaacaaaaaaaaagttgctaaaagggtaagcacgaaatctgggatactgacttaacatggctggcaatatatcagctagtgatggttttgctgtgcagcctgggaacaagaaatcattaacaccatcattagatgaaatattgtattgaccagtgtttgtcaaagcgcaatccttatataacagtcgtctgggatgcttattaaacatgttgattcttgagtatcctttgagatctctgatatggtccttgagagtggagcttagggatcttcattttttgcaaatatctcaagagattttatgcacattagtttgagaactgttggtagaaactgaattggttatttggggtcctagtgtgctctgtcagagttyatttttctagctagctagctaaaatattccttttttttttttttttttgagaaaaggtcttgttctgtcacccaaggctagagtgcagtggcaagatcatggctcactgcaaccttaaccaacctcctgggctcaaacgatcctcccaccttagcctccctagtagttgggagtacaggtgtgtgccgcgacacctagctaattttttatttttatttatttatttatttattttaagacagagtcttactgtcacccaggttggagtgcagtggcgctatctcggctcactgcaacctctccctcccagtttcaaatgattcttgtgcctcatcctaccgagtagctgggattacaggtgcatgccaccaggcccagccaatttttgtatttttagtagagacgggattttaccatgttggccaggctggtctcgaactcctggcctcaagtgattcacccgtcttggcctcccaaagttctgggatggattatagccatgagccaccgtgccctgcctaattttttatttttcttagagatgggggtcttaccttatttcccaggctggtcttgaactcctggactcaagtgatcctctcaccttgccctctctcccaatgtgctgggattaaagttatgagccaccatgcccagccctcaagtattctttaagtacacatgtgtaatgtaaatacaaagagagcttaacatctgaaccttccagatgtttaaaacagcctaagataattgccaaggacttgatccaaacaaactctagaaacttgatacagggtgattacagtgaggagtaggcaagagaaatgatactgcaaagagatgtccattaggcttccttgttcaaaacatttcctccgtacttctttctacaaaagcagaaattattttgagtgaagctaattctttttaaaaaatgcctactaaaagttaagctagaagttatgattcattattaaatagtctgattgcttttcacttagctaaggtaagccacttaaaaatagagatttttgactgaaatgtgtcaaatttggaatttggtcttttgactagaaagtaggttggttgggggcatgatgtgtctcttatagggaaaagcytttgcttagggtaagggcgttgacttggaaagtcatgagaaaaggtttgaattttraattaatgaaagaaacaaaacaaatttcaagctaatctctaactgttatttagggccamagtgatgacacctacgggctacttcacttaaaccctcctcagtcctgtgaccagcaggatccaaaatctgatcctgtcatcagaagagtagatcttttttcctggaaaaacctaaaaatatggttgaaataaacataggttgctatgttagtaattttgtggtcaaaaatatgccaaacccatgatttattttttctcaatttgagtagaaaggattagtttgcatttctttttgaggagcctattgttttttttttcttcttctgagacggagtctcactctgttgcccaggctggagtgcagtggtgcagtctcagctcactgcaacctccatctcctgggttcacgcaattctcctgcctcagcctcccaagtagctgggattataggtacgtgacacctgctggctaatttttgtagagatgggggtttcaccatgttggccaggctggtctcgaactcctgacctcaagtgatccgcctgccttggccttccagagtgctgggattacaggcttgagccaaggcacctggccatgagaagcctattgtatctgtttgttttcactgtctctttgagccctttcttttgaggaaaaacaacagccatctctttttgtctatgccctgtgaaatattgtgtcgatgtttacaagtgaataccgaacagaacgtatatattatacttgggaataccatttttctaggttaaaaattttggtaattgtaacttgttttaaaactttctttgtgatttaatttttccattaacgtattggctatttagagctcgggccttaaataaagtaagacaaacctagaattgggtgttggcacccatgggctgagtgctactgtttaagttaacttcagattaagccctagttttatcatatgtaaactgagaataatatacccaattcatgggtttcttgtgtgacttaaacctggcacttagttttcagtacatattcactaggctgggtctataataccttctcattgatgtcagatctatttcagaattttcttgaattttggaaaggtaatccattccatatgctgttaaataaaactgcagtaaagtctagggcagtgcctgtagtttgtttggcaaatgcttgtgtgtggataagtaaggttaataaatagccacacatcaggtcagattttgttgctaaatgaactttcagttttttttttagctttttgcattttgggtcagtggataaaggattgtgtccctgtattttggattctaatactttcctctaagaatgaggaatatctgatgaaagtttatcctttatggcatgctttaaaatgcttaggaagagtatttgtaaatagtgaattaacattgtgtatctattacatgaataacttgaaaatatcttgaaattttgtatttataacaaaatgtggcagtactgtattcctttcaagttcttaaatgtaatttctaatccttactgcaggtgtgtgaggggctttctttacctacttttctctatattgttgtggaagtatggaagaaaaatattgagagtttttgtgccttagagtagttgagagtgtggttagagtggtggtgatcagggtgggatggggttaggaaattaactattattgggcaccttcttattcctgattctagaaagagttccactttcccacagttaatattaacacctttttttaaaaaaaccctcacaatactatattaatttggtgttattatcctcatttgacagacaggaaaactgagactcaggttaaatatgcacaaatagagttgaagtttgcatgtaggtctgtccgacttgaaaactgttctctgcattacattaccaaaatgtgctcttctcaaacttaaaattggcactttggaattgaagagttaggacatctccatggctgcttaaatgctgataaattagaattcttaatgtattaagaaacaatcaggagatgttttgaggtgaacataactttgagtaatgatatcctgatgatgagcacagtgtagaagagtgctagtctcatcagcagttctgggtttggcctgccattaagaagctctgtgtttctgagtaattctcttaatcacctctcatcctcagctcagctccatgactctgctttgtgctgcttcataaatgcagcaagtatgtgtatttcaagaatgccaaaatattaaaaatttttgaattttaaggaaaaaagtcgttaagcaaatatactattaaaatatcagtttgaataaagtgaccaattacttatggaaatgtttgtgtcattttgaaataagagattatactgaagtttgatcttcatagagtgagaatgtcatgttgtcctgaatgctttcccagaatacgtggaaattatgtgttaaacatgatctctaacagcttacctactccattgtttatgtgcttatacttttacacacttawctttttacgattaattgttctttctcttttaaccttaaggaaaggtattttcaaaggctagcttaacagcccacaaaaccacctgacgtaagctttagttgataagagaatagtaacttcagattgatacagcaaacttctcattttaaggcatgggttagctcagcacttcttattttatattttgtttctgcagtgcgtatgtagtgaaaagagcattagctttgagcccaaggaaatctggcttcaaattcagacttactagtttcatggccctgggcaatttacttcaacctaatttttcttatctgttaatgggactaataatgatgactctaatggataattgataatgttagagataatttttttgtaaagtgactgacatataataggagcccagtaaatgtttgctgctgttgttatattttggagtcagaggcctggttcaggttccgtgttttaagactggctgtgttttctgcatcactcaggtgccccacctaagtgtatgaagtcttgggctttatcatcttacctttctgcctagcaagtatatacacatctctttttatatgttaacttatgttgattctgtaagtttggaacccaagttttaatgttcttagaatcatattttcttcagaaacatgcagtataggagtgggaaacctgttttctgatgttcactagggtaaggggaaaaacttatcaaatgcacgcatatatatatttatatatatatttttttttactgtaaaatctttggtatttggtataatatgcaaacataatattgtataacaaactgagaaattatagcaaattaaaagaaaaaaactacctcattctcagtactgtactgataccatttaggtttatcttttgttgacataatagagtaacgatgccaaagaaagccctatgtttttgtctgtcttttaaaggtccatagctgcttaggttaaaaattggaatagttgctgctaartttgatgaatacattgtcttttctttctaatgttttctagtaaacatagtaactgatatcctttcctgcaatggaggaaagctgtcaatttcattttggggaagttggtgtaatctattttaatattttttaaaggttctttttatggtgcaacatcaccaccttgtggccttctagaatattgttgcaaggttgtttccacaactgtaagcataaattaaattgttctctgatgttggccaacgacttcgtctagtttgtaatggatagctttttactgtaaataggggtggagaacagaaaataaaatggtttgtatacaaggattgcaactttataaaagtctatttgaggaaaataattgtataaatcattctgaggttggtataataattatggatggtttctgtgtatttcatattttcatgaaatatgcactattttcagtgaagtaattctaagctaaaaattatcaatatgttctatgttccaattctcatttaataagaaaactgaggccgagtgaggtttagatgccccatctcactcagccatttaatatagaactgtttgttgtctaaaacagtgttttctaaactgatgactcttggagggatattttctacatgagtctttacacttttttctttttttatatgactgctaacagccaaatactcttttcattttgatgataactttaaggggaaaaaaatcagtatgaaaagtatgatggttcatttaaaagagcatctagaataaataggccatttggttttactgctcgtatttacttagttgtttgggcatttggttgacactaagtattcttcagtagcaaatatgtattaaacacttccagtatgccaagctttgagggaggcaagctggatacagtggcgaggacttgccctggcattcttggaatttagtattcagtgagataaataaagctgttttgatgacaaaagtttaatatcagggattctggataaaagtagctataatttgttttgtgttaggcatcatgcaaagggatttaggtactgttttttagtctcagcaatttatttcagaattttgctttgattttgcaggaacagtgtatatgcacacaaataagtattggtggaagccctgacatacctccatggaacgatagttttccttgtaaagtattaacaatttggctgttacagtaccagtgggctttcacggcttggtgttggtatcctaccaccatttgtcacaatgtttctgtgggaaaatttgtgttgtattccaagaagccatcttgtccttaaacttttggggtctaatgtttgatagtttgggggttagcatatgacttctaaagtgtttggaatgtttaattaaggtcggggagtatccaagtgtaataagcttctctcttatattcttttgtttctttgagtatttaataagtcaaactagcattttagatcctttacttttgtattggacgtttttctattgagcatttgttttgggctgtggagatgaaatattggtgaggtgagcatggacttgaatcttagattagggcagagatgggagaggatgtaggtgggtattgtcccacttgcatagtattttcttaatgatattttaatgtaaaatttcagttctatgctatataggtattttcttaacctaaccactctagccatcttttattgttgtcttagcagttaacataataatatgttgttttattaattgtgtatctgtgtatcttcatttaatacacatttattgaggagtttttttttttttcctttggagacaaggtctagctctgtctcccaggctagagtgcagtggtgccgtcacaactcaccactgcctcaagttccccaggctcaagtgattgtcctacctcagcctcttgactacaagaatgcaccaccacacccagctattgtttttttttaatttcctttattttgggtatatataattctatttttttgtagagacaaggttttaccgtgttgcctaggctggtctcgaactcctgggctcaattaatccacccaccttggcctcccaaggtgctaggattatgggtatgagccaccatgactggcccatttattatttagtaggggccagacattgggctagaggctggaattacaatgaagcttgataataaagactttaacagtgtaacgggagagatagagaaaaaaacatggttagagtgctctgaagacaaatagcaactagttcaaaactggagagatgacacctgagcggacagatgattagaaatgaaggagaagagtagtgggagaaacatgtgggaagtcgttggtatccaaatctgtatgagaatcacctagaatgcccaacacagtccccaggtgattctgccatgcagccagattggggacaattggcaatgaattagaaatatgtgtgaatagtgaacttttcttctggagaatcatctttttttctctacctaaattttaatgaatggaggtaagagagggagtgtgtataaataatcgatttgaatgaccaggaccagtttgataatagttggagtgtacccctttctcttctggaacctatgctataaacaactctaacagtttcattgtttctaaccatgaactattaaaatgagctggaagaaaagtcttgcctatggggattggtgccattactcagctgggcccaagtttctcctctgtctgcctcaaattccttaccttagtcacatacctggtaaaacagggaattttgtctattctcattgaccattgtattcccagtgccccaaagagtgtctcctacttcaccgagaaaattggagacattaggtaacatttccttaactttctttccagacattttcaaagataagcattcttttctcttccaaatctcagagtaagagcggttttgtctatacctgtgtttaatctcagccagttctgccttctcagggatcttgtgttagtgatcatcatcagtgaatgactacagcttctgcttgcctgtaaataatactctctttcatcattaaaaacagtcctcggcgggcgcagtggctcacgcctgtaatcccagcactttgggaggcggaggcgggcggatcacgaggtcaggagatcgagaccatcctggctaacaaagtgaaaccccgtctctactaaaaatacaaaaaattagccgggcgtggtggcgggcgcctgtagtcccagctactcaggaggctgaggcaggagaatggcgtgaacccgggaggtggagcttgcagtgagctgagattgcgccactgcactccagcctgggcaacagagtgagactccctctcaaaaacaaaaaacaaaaaacaaaaaaaaaacacaatcctctaaatatcttttacgcttctgtttctcttgggcaacagactgagactccgtctcaaaaaaaaaacaaaaaaccaaaccaaaccaatcctctaaacatcttttacgcttatgtttctctttgatagtcaaaatcatctgaaaataagtttctggtggttttttttgcttggtaagccacaggcttcaggtcctacctttccatgaaaattgctcttgctaagggcctcgtaactttcacattgttcagtaaacaatttgctctttttactgatcttaccttggtggagttggtcactgtttcctcctccttgaaattcttccttgaagttttcttttggttttcctcaccccttttcatagttcctgcctgctgtccagactgttastcctggggttacctaggttctgccccctatgcagtaggcctttcctgagtgggtacctgtcacagcatggctggctttcagtttactctcaagctttgctcataggatgccatgcacacctttgcctccagaatatatctctttgctgtgctgtgtctcagtcagtaactattaattgggggcctttccccagccagactctggcgtaggttctaggaatagaatggtaaataagatagtctctgtcctcagggatcttaccttgcagagttgggggtatggatagaagtgagaggacaaaatatatgaacgtctgtaattgagaattactaggacagataaaatagggcaaggtgctagagttggcctatggtgatcaggaattctttctgaagagatcatatataagttgagttctaagactgagaaggcagccaaaggactattgattggatggagcagtgaatgcaaaggctcctttgcagcattcagggtaattaggttgaggaatgtcaggaatagataaagaggagaagraagaggtggggcaacagatcacataggcatttatgagtttggatttattgtagttaaaatgagagaacgttggaaacagagttaccttcatgtatcctgctttagaaggatcactgtgctgggtagaggatggatctaggttgggagtgaagagtggggcaggragaccatttagcaagctgtgcttagtttggatgagaaattatgggcttggagataagagttgtagtggtagtgatggtaagaagtaattggcctaggcagaaatctgggacatattaacatatccccttcttttacccctgcatctcagtagtccaccacttatagattctgctcctcaatacctctgctgcttcttctctttcccctaatttcaggccattttctgcctagactactttcaggctacccttacaacactgtcaaaggggtttttctaaaatacacatatattccttctctgctgaaaatgtagtggttctgtatggctttcctggtattcttcatgctatagcttctttctgccttaatagttttgtctcttagatttctctccccatacccttcctaacagaactactttttaacctgcttatgttagtcatctcacctctctgggcacagaatgccttgaaagcatgtctttcctttccacttctttccttttgtatgtgcagctgctgcattggagtcctccacaactcatctcaactgttaccatttctcagaattctttcctgacaactctttacctcttacctccaaataatattaaggtgcttttgttcttctgtagttactgtctgcacacccctttctgtcaatgaacttaaaattgagtcacgtgtctgtttctgctactaaattttaaactcactgagagcaaagagcatattttatatggcttttatatttctagtgtttaatatattacctgaaaatatgcctagtgtgtgtgtgkatatatatatatatatacatatatatacacacatatatatatacacatatatatacacacacatatatatacacacatatatacacacatatatatwcacatatatacacacatatatatatacactaggcatatatatatacactaggcatatgtatatatatactaggcatatatatatacaaggcatatatatatatatatatatatatatatatatatataactggaaaacttcattcaaaaaattgttaaaatgcctaatgcctagtttctttgattattgatcacctttttttttttcacatggtaaattgatatactagaaagattaaattagaggcttatgtcagtatttttcagggagagaatggaggccacatcagtgtttattgagtgattgaattgtagtcttatggtgcagacaggtccaggagaaagtaggtgtraggtggccactgtttggccttggaaggggaacagaaatatttcagtagagtggtgagggcagcaaccaaattgcaagggtagaagaatcggtgacaagcttagacatcattattttaggaagtgagttcatcaaaggaatttttttctccctttttcttgttgctcttgtttattttaagtagtacatgagccccaaatctgtttgatgaccaaaaaaggagggtttaaatgagggaggagaagggagggaaggcattatcctagaagatgacagtgtgtaggtataccacttcagaaagtaggagggtatatttaatttcaaggactcaatgctagacaagatcgagtgtagtgtctttttacagaaatttacatcagaaattatttaaaataaaagctgggattagtatctcaaaagcacctcagtgtttagaattaacagatacaaatcagataaatatagcaggactatctgcatttttctataaatgcattatttaactttcattattgaaaattgtttctcgtatttaatattatttaatatttttctcatgcttaataatttagcatttatatagtactcgataattcataaagtgcttatataatcttaccttgaaggtatcaaaaaacaaaattatcacaaatttagttacagatcaaattggcttttattcatgatccatgaatggggcagtctccattctacaatatggaatgagaacttctgctgggtagtggcagaacactgggttttgtgagatggggacgaggaaacaacaacaaaaaaagctgactggttaatgtcaggttacttttttgtaaggattaaagcagaggggaattccttattatgttgactcagtcagactgttacctgtttttagggaaagctggtctgctggtctgctttaactgtctgcttccttgaacttttagtttgattatgtggcatttagcatgggtggcttcattttgtcttggtctggtcttttggggcctagtgcaggagcttagtccaaaaacaatggcttcccataagtttttttttaacaaaggctactgaaagaggttaaattatatgtctatgggccgagcatggtggctcactcctgtaatcccagcactttgggaggccgaggtgggccgatcacttgaggtcaggagttcaagaccagcctggccaacatggtgaaaccccgtctctacgaaaaatamacaaattagccgggtgtgggcacctgtggccccagctactcaggaggctgaggcaggagaatcacttgaacctgggaggcagaggttgcagtgagccgagatcgcaccactgtactcagcctgggtgacagagtgagactccatctcaaaaaaaaaaaaaaaaaaaagaaatttgtctgtggtcttgctgattttatttattaggtatttattctgtgccaggaagtatttttagtgctttgtcactaaaatgacaaaagtagtgtacgtgaaacacattttccttgaaagggtggttagttagttttgctttgggtatgtaattgtaacttttctcattaattgggacaagaaccctgataagaagagcacattaaattgctctgatcatattttctggtgtgactgaagccttgctgtgatgcagggctatttagaaggcaaggacatagatggaatttaaagtactcaaaaatgtacttgattagaattaatgagaatgaaaagagaattgagttaaatagcttcactagctattggacttgaatttctgtaaataaagtgaattttatgtgttggttgctttgagggagagaaataaatttgtattcattatgtaactaatagtttagagtaggtgggtcatagaataattttgagaacaaggctttcatatagcttagaaatggttaaaattggcattaaaaagggaatctacagaaaaatcaagatttggtgcttcatactcaaaactgtgatatgtatggtgcattttaatgtaagaatatgttttgcttacattatacatgttaatgagaggtaaattttgaggtaatgtactgtaaagcagaagagttttctgtgtaattgtttgagaggaataaatctttaaaaataaaaaatatttcagtgctttgggagtctggggtgggaggctcacttgagctaaggagttctggaccagcctgggtaacatagaccccatctctacaaaaaacaaacaaagaaattaaccaggcatggtggtgcgtgcctgtagtgtcaactacttgagagtctcaggcaggaggatagcaggagtccaatagttagaccctacagtgagccatgattatgccactgcactctatcctgggcgacaaaagtgagaccctgcctcgaaagaaagaaagaaagaaagaaagagagagagagagagagagagagaaagaagaaagagagaaagaaagaaagagagaaaataaagtaaaattaaaaattaaaaatacaattgagtagaaactcactttctataagaaaatgaagtggctgaaaaataggaagagagtgcatttatgataggggagatgtgagatatatctgaaaaagaaaagtcaagaaacaaggactagatttatgttactggaaaagaagatgtaaaaattagagagtaagagaaaacagaaccaaaaggctcagaaaaaaatctatgtattaacgttaattaaaaattaatgtattaactccctctggttgaaaatctgaaattgggtgataacgaatagtaagaattgggtattcatactaacttaggaaattgggccttttgaagaaaaatacatttttctcatagaaatacttcctaaagggccatatattgtgcactgaaaggaactttgaaattgactaaaaatacagaaagatggagggaagatagtcgaagttattagattctgtggttagataggcatttttaggcttcaataccttttaggttccacatttattgggtgtttaaaataaacacccaaattaaagtcagaggctaaaaggtacctgtagattccatgtttatttgttatttgtctggtagatattgcaagtactcttcaaatcactggaatggtacagctcagaagtgctattctgttttactctgcagcacacttgtaagttatcaggagaggggcattcttgtgttttgaatatgaatggatcaatcagtgatatagggagaggtcaagtgtggacaagaaagctttaattttttggcgggtcacagtggttgatgcctgtaatcccagcactttgggaggcccaggtgggaggatcacttgaggccagaggttaaagactagcctgggcaaatagtgagaccctgtctctatttatatataaaaagctttaaaagaaatcacatagcttctttcccaaatagttagatgtatacattgagaacaccaagtttatttgaagggagagagaaaggcacaataaagacagaacctgggaagaaaagcccaatgggagatagaagtgaaaagtgatattaacgtggcactggtaaaattggaaacaattgtacttagcctgttttcttgacataacgtatgtgaaaatttgaaactatgaagtgcttcgcaaatgtaaagtattaatgacattgccagtaggtcccctacagtgaagggatgccggagagtgctggagagactgtagttcctgagttaagcagaccaattctaagggaagagtgcagtggtagagattcctagtgggagattgtgggaagaataggacccatcaagttcaggatggggccatatgagctagtgaatggaatggagatcagcaagatacaggaagggtgagttgttggcatagatgcagaggctgtgatggcttggggtatgatggcatggggatgatgggtgatggcatgggccagggaagaacagtagcactagttggaaatgtctttgattagggagatcagtggtgatgatatggacagagagtctgttaaaagtaaatgattcggagggctaaaagaccctgggtattgagaaagcctcttactcttccctcttcccttctcctgacatgtagttccagtgatatgattttgagccttagtgatgagtagttcctatcaaattggtttttcctttctgaatttgcaggtcacatggaaatgaaaaatctaacagaattatatttttataacaggattccactagaaaagtttctttgagatacatcaagagagctgtctaggcagttagagccattacactgttcactaggattatcaaaaatcccagtttggccagaactgagaggtttcccaggatgcaagtttaaaacctgatgctcctgagcaaactgggacgagttggtcaccctcctgtttactctttcattttataaattcattgaaatgaccagtatttctatgtagaagtaatattactatattcgtatatataatttaatttaaaattaagtcctctattttgtagtttacattttaatgaaatatttattttatgctttggagttgctctattgaggggggagactgcatggttcatccatttttatctttgccacattcattgagttttaaatttggtgcttgataaaatagctttgcctaagtgcaggctttctaaccttttaggttccacatttattgaactaaactgctctgttacatatcatcctatcttgttactgagtttttttcttgtgtattagtgttgtcttcaaaattagactcagtattgaagccaggactttgtcttctaccatttctgtatccttgccatacccactttataaactaggcagccaataagtatgtttgttaattgatccaggcacatagatatgtgacagcatttatttgacttttcaaagtcttaacactgcagagtgtgcagaatgaatcagatctattctaattggatttctttctttctttctctttctttctttcacaattttgcttctgacttgagaaagacattttgaagtaagcaggcaattaagatatgccttctaaatgaggatttgatagatctataacctaagagtactggaaatgtcgtttattatctacattcaggacttttttctgttctttgcagttgaataatagtgaacctttatacaattctgtgggattttcaaagggttggactaacataatcagcttagatattactgaccataccctctgagcatagattatgacctaaaactcagactttgttttttcttttgccaaccctgctttctaaattgctgaacctaaattgatcatatagtttttctgtcttctcatatcctggggaccaaggacaacttgataaaagtcataccactatgcagattgttgtccctgagggcttgtgataagcacagtattaatacggctcagcagaatttgatcagcactctctcattctgttcaacatttattccaaaatatctccactgtgaacaagcccattgtcttccatggaagttaataccacttacataaaccgtgactcccaaatgtttcttctccatggacctgtttcctcaactgcatgcttctctaactagctgtctattacacctggttgttagcaattttcttttgaactgcatatccaaatgaaacttgtatatttaacctccttctcccacaataaaaacaataagtcatctttattgagtctttacttcgtgtcatatactctaagtgctaagtgttttacatgtattatctcatttaattcacattgtaacatgagatagatgactttgtttttcctattctactgctacaggaaatgagccatggaaaagttaacttggtcatacagctcttaagtggcagaactggaaatgaaattcaaataatcttactcttctctctatcctggttagggaaccatcatccactcagacaatgaagtgggaaattttagtttttcagattcttgtttttttgtaaccctcagccatcctatagtcatctggtcaaagaccttatatgtatcctgagtttttctttcatggtgccaatgctctagttcagataagctcactatcttaaatctaacccccagagcttccaaagttatttttccaaaatgcaattctcatcactgaaaccatcaggataaactttaaagtactatgcatggtatattttaaatacaatataaactattccataggatcctatgcagtttagaccctctctgtttgcctgatcacgttacactgtccttatgttccattgtccactatgcaagcagttctctggatgtgccgttctttctgtaattctctcttgaagaattacacacttcaagacgcagttctctcagaggttatcttctctgtgatccctttcttgatccctgaaggctggattatctactttctcttgtgtgccccagatgtagtactttaccttttgcatctattttaggaattatcacactgaaagctatttatttgtttacagggttgtctcctcacagactatgagctccttgaaagagggaatcgtgtcttactcatctttgtatccccagtgtctagcagttcctgatacatagtaagtggttaacaatttttttaaaactaagactataattaatagtcagacttcatacattttgatagttaattatgtagacctagtaatacgttgtcataaaaaatatggctatagacttctaatactcctgaggctcagttttctcatctctaagatagacagagtgcctccctcctcacacagtgttactgtaatgctcagatgggagaatatatgacagtaccttatcttttaagtgtcatacaactttattaaatgaagtgcggagaataattgttgaaattgataattttatttgctgtatctcttcacttttaaggcaagatggtatcattttttaactatctctcatggttttagtttaaatttgcagttactgcttaccagaacatgtgctcttgagtctggggattgggtgatatgaaagggtttatatagaataaagagaaaaatagattgggggtggggatcagggtacagagaaagtttcatgtagtaaagtgaatagttttttacctgattggyactgttccccagtttgcacagtattgtaaacttttaagattcttctcaaataagtaatctatgcctcttgcctttattctcagtagttatctttctgtttaattccctaataaggttctttgatttttgtttaatctacctccatatgaatcaatatcttcacctatccttaaatccctcatttactgcctagaggaagaagtgtctttttcttggaagactaaatgctgtctgaaagctgtatctgtccttcttttgcatcacaggccccagtaattacacttgatgagttagtgatttatactttactgtatctacttccgtgccttccatacattctttaaattaaaaaaaaaacccatgtaatttgagtgtaccagataatatgtaacatatgcaagtcaataataaaaaacatttgggaaccaactgctcagctgaagaactagatcaatcccaatatggttaaagagctgtgaaaacctctctgattccatattcttaccttttcccagcccctaaagtaagtgctatcctgaacttgtttccatcttttctttttaaaataccacaaatatgattgtttgatttgaatttcataatcatgtttgtaggctttttaaagcttgcacatatggtattttattatagaagaaaatctgatttacaaatctttatacatttcaaggaaaacatttaaacatcataaaagatgtttgagcagacataaaaatagacagaaatatctcagtaggcaaattcaaatttataaccagaaaataattgtggagacttatttttggactctgtagttattgctgtatcatagacaagtaaacatttctgtacactagtttctttattgtgtgcagaaatgtttccataagattcatagagtactccttggaagactgacagcttgttatttgttggctgtttggaccttagcagttctttactgggcttctgtaattgttcgttggacaaactcttgaggctcaggatccacagtaccccacatttctggatttctttttcaatcatggaatcatggtgttttcaaaggaaatgaataacaaaagatgaggtcatgataaccatcaaaataattcatttcttctttgtcataaggagttggaagaatttcttcatgacttcagtgtagaatgttaaatcttggagacagaactgagaagaaggtgttaatgctcagaactcatctgtcttttttcttttctacttacttgttctttttcttagatatattcatggtattgcttatagctatattcattctttttttttttttttttttttttttttgagacagagtctttctctgttgcccakgctggagtgcagtggcaagatcttagctcactgcaacctctgcctcccgggtttaagtaattctcctgcctcagcctcctgagtagctgggattacaggcacctgccacctcgcctggctaatttttgtatttttttttttttttttggtagaggcgaggcttcaccatgttggccaggctgttcttgaacttgacctcaagtgatccaccttgggatccacctttgggaggcatctcagcctcccaaagcactggaattacaggcatgagccaccgcccctacctgtagttcattcgttctcactactatataatgctccattgtatgagttaggctaatttatgtaaccatttttctaccaatggacatctgagtatttttcaatttttttgttattatgaagaatgcttatacttggtacacaggtacaaaaaattttataaaattcaaaattactcattgaagggcatacaaatgtttagctttaaatgataatgccaaattattttccaacaggattttgccatctgaaaacgcctaccagcggtgtataagagccaccactgttgcatgttttttgccattatttggcactatcaacattcctagtttttaccattctaatgaatttaaaaatgacatctgtgtggtttgtatttctctgatgggcagtgagattcaacattgtttcatgtttgttggccttagaaatctccttttctgtataattacagttaagccttttgcctatttgcctaatgtgttatctttttcttatttgtaagtattcttatatatgtagtttaaatactaatctttaattagttttttgtttcgcaaatttattccagtttctggcatatcttttcattttctttatgatgtcctgatgaacagaagtctcagtttccgtgtagtcaaaatattcaccctttttttctttttttgaatcagggtcttgctctgttgcccaggctggagtgtagtgacgtgacctcagctcactgcagcctccacctcccagattcaagcaattctccctccctcagcgtcctgagtagctgagactgcaggcgcccaccaccacgcctggctaatttttgtattttttttttttttttttttttttgagacggagtttcgctctgtcrcccaggctggagtgcagtggcgcgatctcgactcactgcaagctccgcctcccgggttcacgccattctcctgcctcagcctcccgtgtagctgggactacaggcgcgcgccaccatgcccggctaatttttgtatttttagtagagacggggtttcaccgtgttacccaggatggtctcgatctcctgacctcgtgatccgcccgtctcggcctcccaaagtgctgggattacaggcgtgagccaccgcgcccggcctaatttttgtatttttttagtagagacaggttttygccgtgttggccaggcgggtcttgaactcctgacctcaggtgatccacccgccttggcctgccaaagtgctgggattacaggagtgaatattcacacttttcttatttggttagtatgcccctgtctcttaagaaatccttccatcctgagaggacacaaaacaatagttttctgctgtaatttattctaaaagttctactgtttccctttcatatttatgycattggtccatcttgaattggttttatatatgatgtgcagtaggggtccagtttcattttttttccatatggataattccaggtttctttaagtgtccctcttttctcatggatctgcattgctacatctyttatgtgggtttgtccttatatgcattggtctgttttagggcttcctattttgtttcatttttttccccttcgttagtcttatcagacatttatttatcttagtgttttctaagaagtagctctgactttgttgatcctttctgttaccttctttctacttcattagtttctgctctttattaactcctttctttgggtttgttctatttttctctttcagacttaccagatgacctactaacacatcagttttcaacctttcctttcctagtatgtctttaaggctataaatttgcctctaagtataacttttcccacacatttttatatgtggtatttttgtttttcagttcttagtttgtttttttttttttgtaatttccaacatggtttcttttgattcactaaatatttagaagtgtttttaaattctatttatagttttcaaatttatcttttgttactgatttttaacttaattgtattacggacagaaacttagaacattttttgaaatttagtgagattttcattatatttcagtgtattttttttgtttgtcactcatgtytcatgaatacctgagaaaaatttttattttctgatagttggttatgaggttctgttgatgttattaaatcctgcttgttcattattattttttttgtctgcttgacttrtgattaattgggatgtgttgaaatcacccacaacaatggccaatttgtcaatttcttcctgtagtttttactgtattttgaggcttcccaccccatgtagactgtgaattttattttgtcttgtctggatagagatttttgttgttgttgagacagagtctcgctctgttgcccagactggtgrcttgttttcatataaatttgatttttaagattatagactcagacttggttgctcttcgtcttaggtactcccaatggcttaaattggggtactttcctaaaacatacgtatatgcttctgccatatgttaggagtttctactgacttgggccctttgcttggtatgggaatctcactccttccccttgtagcaggcccagtgctttgtctgttcctgtagcaggcatatccagggcaacattctaatgyttatttttatttttgcttactactcaccattttttctgttatttcaactaactttagggttttcttttaatgggatggtaataggcttgataattttcatgtactttttgagaacttcttagttgatttaaacaagtagttttaatatcttgaaaattacaaactcttatctaacacatgaataaattccccttttttaaaataggttttagctgaattttgggacatggccactgcttcaccaaggtctgatactagtaataaccacagtggaaggttgcagttacaggtaactggtaagttatttttatatttaatatggtgattccctgatgaacttttcttttgaatacctaattcagcagacttattccagaaatagaatttcttttagattcatactatggcatatttgttgcaacaagcctcaaaggtagatgccctccaaaactatattatttattcagtaaatatttattgaacctatgctggatgaagagaagatatagcctctgtaatggtgggagaatttgggcttttgaataagtatcattgcattggcccttaaatgattaataggatggagcaggatgccaaaggccttcttacatacatttagccatttgttcaatcattgggcaaatatttaagtgggattacacagtactgtaattcccatggtactcattatatgaatttagttatttctaggaggtttcagttaacagagctaggaaatgtttcttgtagaaagcaaaaaataaaaaatattttaacatcctgagttcatgctgatatttccaattcataataataactgtagtctataagtaccattttctactaaaaggaaacaaaatttaaattaatttgactttatattcatatctttttttttcttttgagatagggtctcactttctctccctggctggagtacggtggcgcaaacatacctccttgtagcctcaaactactgggctgaagtgatcctcgtgcttcagcctcccaagtagttgggactgcagatgttcaacaccttgcctggctaatttaaaaaaaaatttttttagagacagggtctcactatgttgcccacgctggtcttgaactctttgtttcaagcaatccttttgcaccaccctcccaaattgagccactgtgcctggcctgtaactctctcctcttaatcaaaaaatctccattcaaaatgacattatcataatatctgtttttatcctactacaccagttcaaaataacatgaaaattaccaaaaacagagggagaaggaggtgaaaaaaaggtaatttaaaaaattaccaaaaacaataggtctactcattgcagtttaagatttctttgtgtgttttccccctttaggacgtataatcaaaataccatgttttaatgtactttagtaattctctatttggttatatcaccaaattgataattagttaagttcatcgttttcagttttttttttaattttgttttataaccttgtaagacatttacatagtcccagagtcaaaaccaaggtacatttagagaggtctggctacttggtcccattttcccacttctctcccttgccctgtaggttcacatttttattagttttgctttatccttctgttgcttctttttgaaaatataagcagatamatgtgcagtatacgtatctcatctctcctcttaatcycctaattcttgcatacttctctgtgctttgctttttttaactttacagtattattctggagtttgtttcataacagaatattctttttcatcattgcgccatatcctgttgaatagatgtaaaaaagctaactagtctccttttgctggacattggcgttccactgtttgctattaccaatagtgctgcarcaaataacttcatacaaaagtcgtttcttatgtctgctcatgtatcaataggataggatcctagaatgagattgctgggtcaaagggtagacacatgtaattttgccaggtattgccaagttcctctccatggggtctgcaccattttgtgtctacaccagctatacatgacagtgcctgttttcccaaagcctaaccaaaatctgttgtcaagctttgggattgttcataattagacactgaagtggtatcttagtgttatttaaaatagcatttctctcactgtaaggttgaactataagggatatttggattttggtttctgtgaataatgggcatctatttttgaaacagttctgatgaagctgataggtactccactgaagaaccacttacataattccttctacttttgctctgtataagaagcttagagccctattttcactacattttcagtttattgtaacttgcgtaggaccaatggacagtacacctgaggtgtaactttcaaatgatcttgacctatgtataagagttcttaggtaaaataagaaaaaactaggccaggcgcggtggctcatgcctgtaatcccagcactttgggaggccgaggcaggtggatcacgtgaggccaggagtttgtgactggcctggccaacatggtgaaaccccatctctactaaaaatacaaaaattagccgggcatagtggcacatgcctgtaatcccagctacttgggaggcttaggcatgagaatcacttgaacactggaggtggaggttgcagtgagccgagatggcgtcactgcattccagcctgggggataaagtgaggctctgtctcaaaaaaaaaagaaagaaaaagaaaagaaaaagaaaaacctgatctggctaatttgaggtgaaaaagaacatactgaaagactatcaggtgactcaaatctggagaaccagttggaaaatagatgtggaccaaggcagtctaagtagccaaaacaatgccatgacagtatttatcattttgagcgtcagttgctgctctcctttgaaatacagtgatccttttgggaaagaatgatcatggacctgtgctaaatggcaccaggttttagtgccttcttttcttcttgtctttgtcttccgttttgttgatctaatttttaaaataaaagtcaccttaaaattaccagtcttactgatctcacaataacttctgcaataaagattactactcctgatttgtcagtgaggacactgagaatcagagggattaagtgccttgggttaataatgagaaaccaactgaggtcttaggactccaagttgttgctccttttattagattacaaagacctctgtattgattttttcttttttttgaaatggagtcttgctctgttgcccaggctggagtgcagtggcgtgatcttggctcactgcaacctccccctcctgggttcaagtgattctcctgcatcagcctcccaaatagctgagattacaggtgcatgccagcattcctgtctaatttttttttttttttttgtattttcagtagatacggggtttcaccgtgttggccaggctggtctcgaactcctgaccacaggtgatccgcctgcctcggcctcccagagtgctgggattacaggctgagccaccacgcccaggcttttcttttctttttaaaaacagtaagtactcagattaagacccctctaatattgcagtctggctgtttattgtctgtaaaccgaggttctctgccctaagccaattttttwtttttatttttagcatatttactcttatcctcatttctgttcttaacccttatctgattggcagcaacatgtaagaataagagcattgatcatggaacgcggaaaaactgatggaaaaaatcaaacagaaaactacctattgtcatatagtaatatactgtaatgtaccagctactcaaggatagtagcatatagaagtgtattatcttcgatattttagattttagactttcaacaggaaactgtcagaagcatagagtatgcaagatgtataaaggatgagattgaagaaaaaatgggctgttgtattcatgtttataatttttttttagctattgtgtcttctaaagcattttcactttttaaagtaaaagtgtcaaatcatataccacttatttttgtatgagtggtgtgaattatagacttcattcttttcaaatgtttcaaaatttatggtctcatctatcttcccattgatttgaaatgccactgttatgcattagtatcttgcttttctctttacttctcttttacatcactgtcaaaccattttaattattttcactttatggtactttttaaaaaaatattttgagaaatttccttttattactttgcattttaaaatacacgtttactgttcttgatttttctttggcttttatttgaatatttaagtctcccttccttttcctctgcccccaccaaaaacactcaaaaccaatcagttggtgtttttattttaaaataatgtattaaattggagctaattgaaatatttcaatgttaaacttttcaaatctaggaatatatcatatcattttttttaagcctttgtttccattggtaaagttttatagttctcttcatgtgactcttacttatttcttaagtttattactagattttttgaagggatgttattgtgagtgggatttttgagttaactctccctaccctctcacaggtgactcattttctgatagtttaaaaatacttatataaccttagagtggaggacattctgtgtataacaccaaaggaaactcattaaatgagaaaaaaaatctatrtattctactaactagaacaactttttgaattaataaggttgtcttctagttatttaaaatcacattatttatatgtacattttgctagcatatttataaattcctcatgagattaaagattattatctttgaaaaatctcttttcttaccttaccctctagtattgttgagtattttgccaagtaagggtattcagtggacgtattttggatggatctgtaatgaactcagagaagagttaatactatatagtcagtaataatagagtaacagctaccattgttggatgccagacattcattgatggtgatagtgccttgcatgccttcactcaccaatcctaagaatcaggtactgctgttcttctgatttttcaagtaagggatggagaaattaattgacttactgtggtcaggcttttagtaagtggcacatttgaaaaatgaacccagatatgtctatccctctgcttttaacaccatcatatactgacttttccttcttccagtcttctgctatatggataagacttacatatactgaggaaatatatgagcacttttattcaaagaatcttgggaagtttcttgggagagagcaagtctgggccttctatattagtccagtggcgctgaacttagagcagtttggaacgatgaaggatggaaatgagttttgctaagaccctggtagtagcagttcagacataacattgaacactctttaattgctatgttgccggtacttaaatatagtatttgcttggaatcttgcatttatcacattgtatttcagtgatttatttgtgtgactatttagattattattctctcacaatagaatggaagcttacatagctttggttgtttttatatccttaacatccggtgtgtatgacatgaaagaggcttttcccttcctcatctctgatctagggtgttcacaggtaattgattatagaggtgatcttgataagttgttcttactgcctgttcatcagtattttgcccagaaagtagatagtccctgatttcttcatatctcaggtatattagattttcactttctggaaggggttatgattaacttttataatgacattttgatttttaagcttttatttgaaaatgcaaatactacttcttttcgaagctaactttccagataaaacattaaagcatttttttaagtgccacagttatgtaatttcagaaagacaagttaatagtacctggcagggatgttaatgggcatgttgaatctgaagacacttttcccttgatctttaatgcagttgttggtgagaatgtggagaaatcagtgtatattgttgataggaatataaaatggtgcagccactttggaaaatagcctggcagttactcaacagagggttatcacatgagccaggagttctactccaaagtatatgcccaagagaaatgaaaacatacgtccacaaaaaagcctgtgcacaaatgttcataacagctttatgcacaatagccacaaagtggaagcagttcatatatttatcagttaatagataaaatgtcatatacccatataatagaatggtatttggcaagaaaaggagtggagtactggtgcatgttacaatatggatgaacctcaaaaatgtaatgctgagtgaaagaagccagtcacaaaaaaaacccacattatatgattccatctatatgaaatgtccagaataggcaaatttaaagagacagagagtaggttagtggctgcctagggatgggggtggggagagggttgattgggaggagaaagaagggggtgactgcttaatggtatggagtttatttttatggtaacaaaactgttttaaaattgattgtggtgatggttgtgccactctgaatatagtgaaaccattgaattgtacagtttaagtgggtgaattatatgatatgtgaatgatagctcactaaaactgttacagaaacattcaaatggctctcaagcattatcagtagcccttttgtattgtttcttcattctgccaacgagaagagttctagttgcacaagaarcacaattccattcttattgattgattagtgtgcagtactactttttggcaacacatactcactagtgaattatttgtctgttagtttctagtgccaaacttaaaagaaaaaagaactggttcggaacagcaatatatacagaagtagttgtagatggagaaattacgaaaacagcaaaatccagtagttcttctaatccaaaatgggatgaacagctaactgtgtaagtaccttgtgtaaaggacggaaaatcttcacaagaaagtgtattttttggaatatgttttttgttttgtaaaatgacttcaaagtaatgagtgatttttttaaagtgtggatcgacaatttaaagtatggagaaatttttggttaaattttttttttaaggggaggatgcataataatgcttgcttttgctttataaaccaaattatttccattttctctgactgttttggtacagaaataaataggactgcaaattagtcattcttaattttggcatttcaaaataataatggcataaatttgtgtatagtaaaagtatcatgtaagtctttagacatttgttcaaatacaaacagtgttactatgaagtctcagtaagactcctgtgttggtgttttggcttgctgattccaaaaatcctcatctagttattaaagtcctaatgtatttgaaagtaaaatatttttatttatgattcaagtagtttcctgtttcatacaatatttcttctcaaataaatgaaattcacggtttttaaaacattactgaaataaatgctttaataggaattgttacttattaatagaatgacaacgtctactcctgtatttttgttaataattttacccttccagaaatgttacgccacagactacattggaatttcaagtttggagccatcgcactttaaaagcagatgctttattaggaaaagcaacgatagatttgaaacaagctctgttgatacacaatagaaaatgtaagttttttgttctgacctttatttccttataagtttattttagacactttgaacatatcctgaatcctaaaagcaaaaacatagttttgtatccataaagaacttcagttattgcttgtgattgattaactttgtggcattttatgaaataggaaatatttaccatggcctttctgcattctgcagatttacaaggtaatctcagtcatccacaagtaccctattatcagtgactatcagtcatttattatttgcttattattatattctttaaaacttgagaaaattatcattacatgaccctactctattttgtcacttgactactaacaattttatttgggtaaaataaattgtaactcttaagttttcttttattattatataattagtttattgtaaaaaacatgaagaagatagacaattatagagtaatataaaaattttctataattttactatccaaggataaccaatcttaataatttggtcactgtccttttgtttttcatagacacaaacatatttcttttttgctttgcatctactagtttatcctctgctttctagaaatttaacaatataccataaatattaagtttccatgatactttttctagactgggattttaaggtagtttagagtttaattatttgtaaacctcctatcatatgcaaaaatatgggggtatgtacatatatgtgtaattctggggagagggttcatagcttttatcagattctcaaaatgtgtgatcctctgaatattaaaaaccagggttctagctgggggtggtggctcatgcctgtaatcccagtactttgggaggccagggtgggcagatcacttgagatcagaagttcaagaccagtctgaccaacatggtgaaacctcgcctctactaaaagtacaaaaattagctgaatgtggtggcatgtgcctgttgtcccagctacttgggaggctgaggcaggagaatcgcttgaacccgggaggtggaggttgcagtgagccaagattgcaccactgcactcccagcctgggcgacagggtgagactccatctcaaacccgcaaaaaaccagggttctagtttatgatttttaaataccatgtaatgatttctcacaccacaatttatttagtttcccgttgtctgacacttaagtagcttgtaacagttcactaaaaataggctcttgctcaaatctgtaaatatttttgctcttcttatttctgtagagattctcttattaattcctaaaagtaggtttgctgaatgaagtaagggatgaaatgctgatgatgaaaatagcaagttatctttaaaaaggttctttctgcaaatccacatgtaacttaaagatctgttttgatctagtttttggaaataagtgagttatgagttaagaaaatataattatggattataataattagaactagtaattagtagttagtataaaccataataatttttatatatttggcttaaaactttttctttttcttaaagcattgtaagtttgattctctgctatgccatggcatttttttttttctcaatgagtcatgcaattcatcttgatacaggaagaagtaatagattttataagtatacagtaccttgcctggattattattatttaaccatattcccattgttggacatctagattgttttcaattctgttatgttagactctactgaacctccatataaagataactatccacttatctgccaaatgatcttctaggaaggttgtaatgtcaatacacttcgaaatgaagccctcacgaattgtataagctaaaaattaccttggctgtgtgcagtggttcatgcctgtaatcccaccactttgggaggctgaggcaggcggatcacctgaggtcaagagtttgagaccagcctggccaacatggtgagaccctgtgtctaccaaaaatacaaaaattagctgagtgtggtggcacgtgcctgtaatcccagctactcaggaggctgaggcaggagaattgcttgaactgggagacggaggttgcagtgaactgagattgcgccactgcactccaagcctgggctacagagcgagactccctctcaaaaaataactaaataaatatataaaaattatctctgtgatttaattgagtaggatacggatatgctcaggaaaaataaaatttaataaacactcatacagtcagtagatggcttcagaaattttagtagcatcctgcacacctaagaagtcggtaaattagtttgcaagggctgccataacaaaataccacagactgggtgccttaatggaaattgattttctcacatatccagaggctggaagtcggtgattaagatatcagtggggttggtttattgtgaggcctctcttcttggcttgtagatggacatcttttccctgtatcttcacatggtcttccctctgtatatgtgtctgcgtccaaatttccccttatcaggacaccagtcattggattagggcctaccccaatgacattattttaacttaattacctcttcaaaaatcgagtctctaaaaacgtcacattttgaggtactggggagtaaaacttcaacatacgaatttggtgggggacacaattcagccccaaacaaaaggtaaataaatttatttgaagaattaaatctcatgatagtatcataatccttttacaatagaagacatttatgggtattagttttagtcgttcattttatagacaaatgagtaaaataatttaaagtaattaaaattagattttaatttaagtaagttggtcaagagtatacacgtaatttccgggttgtgattaaaacataagttttctgattcttagctgcctaattttgattagaagtaatataaaattaataaggttcaagacagccttgaagcaatttaaaaatacttttataaatgatagcattcttggttgcctttgattcagtctcttggtttagtacttggactctgagttttagttggctatcagttgaatgagctctacttaaattttggggttattgtatatttacctttaaaaagaagtaaacaggctaggggtggtggctcacacctgtaatcctggcactgtgggaggctgaggcaggtggatcacctgagctcaggagtttgataccagcctgggcaacatggtgaaaccccatctctaccagagatacaaaaaattagccaggctttatcaaagatacaaaaaattagccaggcatgtgcctgtagtcccaactacttgggaggctgaggtgggaggatcgcttgagcctgggaggtggtggttgcagtgagccaagattataccactgcattcaagtctgggtgacagagtaagacactgtctcaaaaaaaaaaaaaagtaaacaactgccaagaacaaaataagtaacccaagaaaaacatgacatcctagtgttgaagaaaaatattcagtactaaaaacattttttgttcctatccttaaattctgatttgaggggcaaggttattgatagagatattatgtttctgaggtgtgctctatatagaaaatgtttgatagtcagcaccttgaatagaattgtgtatatttgtgtataaggctccagtggagggatgttctgcagtgtgtctgtgttcctcatctatttgcagaggatagatttttaagggatgtagtgaaagaggaatctcctgagaggaaagaaagtaggctgagtttttaggtgttgaggcagtgaaagaagagaacagcgaaagacaatctagctcttcaggaagaacccgggatctagcatgcatgaaaacttccagtatgatttctggcaagacatttttttaaaaaaagtttatggtgtgaatgaatggcagaaaggataaaagtccttgaaggcagattacaatatggagcaggtgactgttaccagaagtatatgtgggggctctcaagggtaattttaaaggatgaaaggacatggtttagtgatagtgggaaagttattgtaggaatctgaggtaacatttataacaattatagaccacaaacaaagtggaattaatgaccaacttgaaagtagacactgtcttattcacttgtgtttttttcagtgcttcccacagtccacagccaaagattttttaaaaatgttaacagagaaacttgcttattcaagtgaaatcttaccatggaatcttattctatataaaaattttactgtatataaaacataaagcagtattgaacaacacagccatgcacatgctcacatgtccttactcttgttatccacagcagttcctgagttaatttctggtggtaccctgctcctgaaaccagtttgaaaatcacttttctataagatcaagttcaactcctggtttcagtgccttaccgagtcttagttcagtttgtctaatttcctgcttacatcttcataccctgactgctgtgttcagctagtcttctcattatcttctgagtatgctttgctgggtctcctgtactgaaagcaacttatcactaatcatgtccttggtattttcaataattatacatttgtttagtgtgtttttatatttcattctttaacataggtggaattattatggagagtgtgtaaaaattatatctaaggtagctactaagaaggctgaggcaagaggatctcttgaggcccagagttcaaggctgcagtgaactatcattgtgtctgtgtacagttgctgtaccctagcctgagtacacattttatcattttatgttccactcatatagcaggctgttctctcccttcctttcctcctcgttcttcttttgtgtgtgtgtttgggtgggggggcggggtgtcttgacaatgatgcaggccctgtggtatactcaattatttttgtctaagtgctattagaatgtaacttttacttaactatccttacctttcaacataaatgtactgaaacttgcccaaaattctttttggaatggagtggaggtataattaataattccacaaatgaaaatataaactagttgtaatgactgtaactgaagaaactttgagtatcattcagttacagggattcaattttttccgtagatactgtcttactgcatttgttctgctgtaacaaaatacctgagactaggtaacttatggagaacataaatacattcatcacagttctaggatctggaagtccaagatcaagatgccagcaggttcgagtttggagaggatccagttcctgtttccaagatggcaccttgttgctgcatcctctgaaggggatgaacactgtcctcacatggcaaaagggacagaaaagggcacacccactcactcaagtccttttataaaggccctaattccatccgtgaggactgcgccctcttgatttaatcccttcctaaagaccctaatttttaatactatcatagtagtgattaagtttcaacatacaaattttgtgggatgccatcagactgaagcagaggtggtccaactttttcttaacctaaattatttttattggttgccatatatatattaaatgacccttattttcacattcttccattagcagtggtcctgtgtattaggcatttatcttttattggaaagatatttatattagaaccacttaaaggataaaataccaagaatcttgtgaaaaaggtagaagggagtgccaaaatagcctgtgaataataacacggattctactttgtattaccacttgtcttgaccataatcttgatttctaatcttttaaaatatattcttttataatcccagtgccattgaattttactgacacattcatatatgtatatttatttatttatttatttattttatcattattatttttttccttgagacagtctcactctgtcacccaggctggagtgcaggggtgcagtctcggctcactgcagcctttgcctcctaggttcaagcaattctcccacctcagcctcctgagtaactggggttacagacgtgtgctaccatgcaccaccatgtgcggctcatttttgtattttttggtagagatggggtttcaccatgttagccagactggtctcgaactcctgacctcaagtgatctgcctgcctcagcctctgaaagtgccgggattataggcatgacccactgcaacccagctggtgttttatatttttatataattttcttccatcttcataatgaaaagttagcttcatttaagcatcattcagtaagggctgctgtccaacagaacttctgcagtgatggttatattctgtatctctgctatccaatatggtagcctttcatcatgtatggcagttgagcatttgaaatgtggtttgtagaactaaagtgtttaattttaaacttggttttattttaattaaatttacatttaaatagccatacatggccgctggctactgtattggtcagtgcagtatcagactcttttgtgtttgaattgcaaaatcagaatttatctctgccttttttttttttttaaacaactttcctttccttcctacttacttttatatttctcttaggtagagttttartttcatcagtaggtaccaggttgtctgttttttttttccttttttcttttttaaatgttgcccaggccagtggctgttcacaggtgctatcctagtgtacggtagcctccaactcctggactcaagcgatcctcccaccacagtcttctgaggccactacgcttggctaggttgtcttttttgtaaggatcaattctggaagctccttgagtattttcttcattgttagtttgaaatctgtgtttgttttctccttcattatgatttgctgccatttgtcttttatgtttcccctggcacactttttgatataatctaatcatattgcctttttttccctctaggtagttcactgtgtcatctgtttggtctgtgttctggttttgattgatactgttagtcattcatttctttattgcttacaatgttgctttgaaattttcatgttttccattgtatttttagttttcacaaaatcatttcttttataatagttcttaatttatttaaacatcttggtagattatattagccaataattcttattttatttgcctaagattttaaaagtttttcatagaacataagcatttattattttgacttctgcagtcttttaaatcagacctgagttgctttttaattttatattcccatttgctaacagccagtagacttctcttttcttatttatgactttttgaaataaagatgactttgttgttttgatatgtttggttcaaagcttcccatcttccaagaagttgcatattttacctctgatatgctttgataacttgcttaaagttagaaacccttaaaattgtatttcttactttcttagatctgggacttttcttcattaaataaacatttattgagttttaggaagagacatacaaaacatataaagaatatgtggtttctttttttttttttagtatttattgatcattcttgggtgtttctcggagagggggatttggcagggtcataggacaatagtggagggaaggtcagcagataaacatgtgaacaagggtctgtggttttcctaggcagaggaccctgcggccttccgcagtgtttgtgtccctgggtacttgagattagggagtgtgatgactcttaacgagtatgctgccttcaagcatctgtttaacaaagcacatcttgcaccccccttaatccatttaaccctgagtggatacagcacatgtttcagagagcaccaggttgggggtaaggttatagattaacagcatcccaaggcagaagaatttttcttagtacagaacaaaatggagtctcttatgtctacttctttctacacagacaccgtaacaatctgatctctctttcttttccccacatttcccccttttctattcgacaaaacccccatcatcatcatggcccgttctcaatgagctgttgggtacacctcccagacggggtggcggccaggcagacgggctcctcacttcccagacggggcggccgggcagaggcgcccccccacccacctcccggatggggcggctgcccggcggaggccgccccccacctccctcccagatggggcggctggcggaggtgtttacgcaaaatcgtgcttggcataacactcaaatgttatctccaggctagaatattctnnnnnnnnnnnnnnnnnnnnctggccgggcgggggctgccccccacctcctggacggggcggctgccgggcggagacgctcctcacttcccggacggggcggctgccaggcggaggggctrctcacttctcagacggggcagcccggcagagacgctcctcacctcccagaaggggtggcggtctggcagagacactcctcagatcccagacggggtcgcagctgggcagaggcactcctcacatcccagacggagcggcggggcagaggcgctccccacatctcagacgatgggcagccgggcagacacgctcctcacttcctagacgggatggcggccaggaagaggcgctcctcacttcccagactgggcggccgggcagaggggctcctcacatcccagacgaygggcggccaggcagagacgctcctcacttcccagacggggtggcggctgggcacaggctgcaatctcggcactttgggaggccaaggcaggcggctgggaggtggaggttgtagcaagccgagatcacgccactgcactccagcctgggcaagattgagcactgagtgagcgagactccgtctgcaatcccggcacttcgggaggcccaggctggcagatcactcgcggtcaggagctggagaccagcccgtccaacacggcgaaaccccgtctccaccaaaaaatacaaaaaccagtcaggcgtggcagcgggcgcctgcaatcccaggcactaggcaggctgaggcaggagaatcaggcagggaggttgcagtgaaccgagatggcggcagcacagtccagcctcggctcagcatcagagggagaccgtggaaagtgggagacgagagggagacgggagagggggagggagagggggagggaggaggagcgggagggagagggagaagaatatgtggtttctgaccactcccccattctaccatagtaggaacccaatagtctaccatatcagaatagattttgcagttattgaggtcatttgttccttttcagatttacaaggctaatttcttcctttgttaaggctccctattgttttctcgtatatttcatggtttttcatctatcttttctgatatatttggggtaatggtgggggagtgatttatttgaataggtatattttctatttttgaagttttttttaatttcttcatccttgatggtatgtgttattacagccataaataaaccttatttacatatacataaataaaccccccagactctcctaacataaattatttgtattgttttccccagaatccaactaactgcgtcttgttagggagattgttccacttcttcacatttaagccctagtgagctttcactccttaaccttcatctgttttgtataagcccagttggtttattcccaaagcttttgctcctttaatcctctaatacattgtctcagaatgtttgtggatttaagccatcatttgtgcctcagttaaacttcagttctgtgttcaggtcagttgaacaacattccaaactatggaaataattttttggctctgcggagatgtgtggtatttttagctttctttcccttatgtcaccagtgtgagatactgatatctgaggtatgtttcactcagtcagcctcactatttcttaaactacataggaaaaaaaaaatccctctattgttacagataaacaaagctggacactgtttagagtagtcagaacatactttaatcaataatatgtttttgcaataaggaagagattccagcatgaactgaactcaactttgatttgtatagaggttactgggtcttttaaaaggagaatgaaggagtgggggtggggggttcaatggaggctcagtagagtcaggaaaatgaaaaattacaaaagcttggtcagtgtaaatgcaattaggcccttgtgtttggtagctggcaagtaacgaagtcaggattctgtcctcccacagagacagggaaacaaaagccctatccttcccaatgattgcattttaaaggaatgtctttcaggcccttgagaaagacactcacatgttataggagacagaggaaggatttaccattgtaagccgtttttagtaaatgctctaagaaagagtagtcgggggcctatcatcaggtgttggttacaacagacaataaattcttttggcagccttaagttttctcaggcaggtgctttaaggggagttagggttatccctaagagccttgaactgttaggaactatggtggtgcttgctcaagtcttttagtgtgtgtgcaatggtggtagtggtgctgggattgtggaggaaatcatttgtgctgagtttgcagtttttctaggccaagattgaggcctagtcaagaaggtcctgaggaccctgactagagtttgattaaagagagaatctttgtcactatacccataggtgaaaaccatagaaatagtatagctaacatacacattagagtatattcagaacttcactttgtgtttcaattttgaggcggagagaaccactttaaatattccagagaggagtgagatggctgccattcaaatactgataattagactgaggttttttatttattttattttttatggtgttaatagaaccaagaacttagtttttgtcaaggaaagcattttgaaatccattaagttcaattcgaagtaaattatgtccaaaatgatttataatgaataaatctctctttatattgaatggtggggaaatacagcagagaaatgtatcatttgtggtactggacagagcatagtcaaatttggttttattttataattctctttagccttattaactgagtgaatttgcttatttagttatttgtttagtttactaagacaaattttgttttataaattcacttactatcaacacaaactcagatattttgaagtcaaagctttgaataaacagtattttcacattcaatgatgtaagtgcctctttattctttcgaaaatttttttgtattgaaattactgggaggtaaaagggaatgaaaagttttctggaagttcagctgcctttctgaaaagttctactaatttatatacacaaacgtagcgtatgacagcacccatttgtaaatatttgccacattattagataaaaaaatgagaagttttattatcaaagcatttctttgattattaataaggtcagatgtttattagtcattcatacttcatcatttatgattgtctcatgctctttgtacattttttattggtttgtttagtttttttctcactaattcctaagagctcttattkttttctctcagttaatcattagcctttttattttttaatttgtatttatttatttttttgagacagggtctcactctgtctctcaggctggagtgcactggcacgatctcggctcactgcaacctccatctccsgggttgaagcgattctccttgcctcaacctcccctcaaggctcttaggaataaccctagctacttaactgtgtgagtagctgggactgcaggcacgtgccaccatgcctggctaatttttgtgttcttagtagaggcagggtttctctgtgttggctaggctgatcttgaactcctcaagtgatccacccacctcagcctcccaaagtgctgggattacagatttattataaataaataagtaaataaattctgaaattttttgttacatggtaggaagtaggagcttaactttgtgagttgttgaacattgactcatagcatgatataatgaaaagacttaggaattttagaaaactttgctattattaagactgtcacttacaagctatgtaacctaatgtgttcattttgtttctaaaaattctgtttttctcatacttttgagtatgttggccagcctctaaatggccttcaagcattcataccttctgggttccaacacccttctgtagtcccctcccacactgcgtcagagattatctgtgtgaccagtagattatggcagaagtgatggtgtacaaactctgagacttagtcatataggcatttcaggttttgccttgttctcttggagtactcaccatgggaaatcagcaaccattgagaagactctcacaaagccctgtggcggggcactgaggtctcctctcagcagccagcacccacctgccagatgtggatgtgcccctcttgagttctcggcaataatgagtgattattgttatttttagccagtaagtttcagaataatttgttactcagcaatagataatacattgtttgagcagtttttaaaaacggcttcagaatgtggctctgagctaaatagaagtctgtgaaacatgttttcaacaaatccatgatttatagaacagattacctagttatatacctacctcctcagagactcaaattgttctgtctcaaattgctgtattaacactaaggaagaaggtctaggaggtacaaaaaaatcagcttctgccttacaagagtaagttcccctaggacaggactaccttaatcacttagtttaaatgttttttaagcacctaccttctctcagttgctgaggatacatcactgaattagttggacaagatctctgctctgctagagacttcatttcatttggggaggtcaaccaaaaaacaaaaacattcttttagtggtaagtgcattgaaggaaatgagcaaagcagtggtaaggaggtctcctttaggctagtcaaggtttgtcctgcttcttccccatctacagtgcctggcacaccgtaggcactcaaatattgaatggataaatacatcggagttggtttgtttatactgtgacagaataatatctttttccctctgacacacacatatacaaacacatgtagatgggaattatttatgtgattgtccttccagttttatgatccaaaatgttataactcaatcttccatgttcagaattgtgaaataatatatactgtaaacaccctcccactgcagaatacctaggtcctggattgaacaaatctttgtggcgttgatgattttgcaaaaaggtagagggctgttcttcttaaaaaaaaaaaaaaaaaaaaaagccaggagatgagggggttggggtaaaraaaacctcatgaaacagaattagaatagtctgccataccaatagcagatttaatgatgctgagcttttggctaatagccagagaagggagctgagcttgaactcctctagtctacactctygggcgtaccatcaaaccactgtaaaattaggacgtatcatcaaaccactggtaaaaattagcttaaaattagtttaagctaacgtcagagaataaacataagggaacaagccaccataagcagaggttgtccataaagagacagattgtaaacatttgagcataaaggccgcatatggtttctgttattaactcgccattgtaacgtgaaagcagccatagagaatatgtaaatgaatgagcatgactgtgttcaaataaaactttatttatgaaaaataggtaatggaccagatttttgaggagatatattttaagagagaatggctgcaggtttttgaacactaatgaaaaacatgagtccacagattcatactgtcccaaacaagagagcaaagagaaaagtcatgcctggtgaccaggtcactaggtgactaggtcagggttaaaccctgactagcctaaagaagacctccttaccactgctttgctcatttccttcaatgcacttaccactaaaagaatgtttttgttttttagtctacctccccatatcatagtgaaatgcgtaataccaaagacaaataaatttaaaaagcagctgtagagaaaaacagagtatttgcaaaaatttatgaattagaattgcagaattagtaataagagaagatagtggaaaaatatcttcaaagagttgagatcattaccaatacaaaattatatgcccaactagtctgtcttttgaggatgagaatgcagacatttacagataaacaaaaatgaaagaatttaccaagaaatacacactaaagagattttaaaaggctcttctttaggaatctattcaaacagctatatattttagggagaagccaaatcaccaaattccagacacttgaaatcatgagagatgacaagaatgaaattgaatgtcagtcaatatagttttcttcagatattgatttttagagaaagctgaaattcgtgcttttgtagttttcttttttttttttgagatggagtcttggtctgtcacccaggctggagtgcagtggcgcgatctcagctcattgcaacttccacctcccgaattcaagcaattctcctgcgtcagcctcctaagtagctgggactacaggcaactgccaccatgcccagctaatttttttgtattttttgtagagacggggtttcaccacgttggccaggatggtcttgatctccagatcttgtgatccgcccgcctcggcctcccaaagtgctgggattacaggcgtgagccactgcgcctggctgcttttgtagtttttgtgtgtgtgtgctttcgtatttcctttagtttttctagttgtttgttttttgtttgtttgtttgtttttgatgtaaagtagaaatgaggtctatggtgctacaaatggttggggtattctataaggtcttcttttatcacatggtttaaacatttttttttttttttgcaaagaatttctttttcttctttcttttttcagacagggtctcgctctattactcccactcgagtacaatagtgcaatcatcacttgctgcagcctcgaactcctgggcttacaggatcctctcatctcagcctcctgaatagctgggaatacaggcacatgccactgcacctggctaatttttaatttttttaaaaaaatagagacagcgtcttgctatgttggccaggttggtcttgaactcctgggctcaagtgatgcgcctgcctcacctcccaaaatgctgggattagaggcgtgagccaccgtgtctggccttaatttttaaattttttagagactagatctcactgtgttgctggtctcaaactcctaagctcaagtgatcctcctgtgtcggcctcccaaagtgctggggttacaggtgtgagccaccaggcctggccacaaagaaatttctgtccggtgattagtagttctagatttttgtcttgtcttttctgtacatagataacttgtgaacatatttatgctggacatttggtaaatggagaacctctcctccctgcccaaatttgttaaatataggaaagatcaaagttaaggacttcatcaaaaacgtgaaatgttccatgattgcaaaaactgcagaaagccactgaagatcagatggaagtatttggcctcagtttgaataataaagtgatcactgataactttctcttttagtttttatttttaaattataaattgacaaattatagttgtatatatttatggggtatggagtgatgttatgatcaattaatacaatgtggaataattaaaccaaacttattaacatatcwcacctcaaatacttattttttttgtgatgagaacatttagaattttagcaattttgaaatgtacaacacattatttactatgtacattacattgtgcaatatctccaagaaacaaaaattccttctaactgaagctgtgtatccttttaccttcatctctccatttctctaagccctcactaatgactattaatatatagtctaatatatagaagtctaatatatcgtttaatgcatagtctaaatatatagtctaacatagaagttgaagcaaaatgaccttgagtttaaataagaactagatgttctaataatgggaaggaagtatttgtccttatataaaaatgataaacgattgtcacaatatgtagcatttatcgagcacttataaactgtgcctcagaagtggtgctagggctgtctgtatggttttgcatttggtcctcaacactgtccctttagtttgaagtccattgtctccattttgtaattaagaaaccaaggcttaaagatgtttgaataagttactcaatacacagccaataagtagcagaactggaatttgaaaccaaacttaatctgactcttgtgcagaaattttgcctcaaccacaagagtcatctgtggtaccttgagctgaaaagcaagtttagacaattgctacacttattatttaaatgtatttatatgttctccaaaatttataatatgcacagaagcaattaaaggtgatattgaaagcgtgggattgagggggaaagaggaattacttaactagttgtcaaaggcatgcaaagaattccttccaaatgtcaagtactgaattagagtgattcttgaaatgtaggtttgatttctgaagcatttttatatgtggcaaaagcttttaaattagaatattcttctttctagtggaaagagtgaaagaacaattaaaactttccttggaaaacaagaatggcatagcacaaactggtgaattgacagttgtgcttgatggattggtgattgagcaagaaaatataacaaactgcagctcatctccaaccagtaagctaactttatatgtttgtaaaatttcaaggaaaaagaataagcaagaagtatataaaaacctagtttttttctttcttgttgttcagtagaaatacaggaaaatggtgatgccttacatgaaaatggagagccttcagcaaggacaactgccaggtagaatattttatttgaatatgggtrgcgacatgatgtggaacatatttcctgaataagaagttttatattttaccttagtttagaatttgccacacagtttagaagcttatgtctaagcatgtcatttggttaattcttgtgaaagtagctttttaaaaaattacagctttattgagatatcatacatatatcatgaaattcactttttaaaagtatacattttagtcgtttttaatatattaagagagttgtgttaccttctctactgtctgatttcagaatattctaccttgaagagaaaccatgtatatacatgagtagtcactctccatttttccctgcacccatgaatctactttttctgtgtctgtggattgtctattctggccattttctataaatggattcatataatatgtgaccttttgtgactgacttctttttcttagcatgtttcaaggttcatttatgttgcagcatatacagtgctttattttttttattgaaaatggctttttaaaatctgtatttagacatattttatgagtacagtcagatactatggataaataggtatcataccgctctctggattggcattatcctgtaaatcatgagaagataaatgcttcacagattgtggccttccttcagacatcattgtggccttccctcagacatcattctaccatttcagaaactccctggcattcacagttcatgacaattaatagaggttttttgtttgaagtaatttaaattggaataaaataatagagcaaataaagtagaattaacacctgaaaatataaaaatatattgtggtaaaatggactcattacctttgaaaaagcatgctagtatatgacaaagtgtgacttttattaatctatagttactagtatcgtttcttctaagttgccgttaagtgattctcattagaccacttgaacagataagtatgccttctgaatgtatatttggcttaagtacatatatttaatgtccatataatttaaaaaaatttagatggatagaggagcttgaattactaccaaatgttgtcaattgcatagtaagacgctttgaattaaagattagttctacagtacggggagaaattcaaatgggttcttttacctagacttctgaatcactgattcttgctggttggctggggaggggtatacaaatcacaatcatttcagtctttacctgcccaaacttcctaaacacatcttgttccaaatatataggcaacaagggaaaggagggtgggattcattaatgttcattcaacagatagttacttaatgcctgtttgatgccagacattagtccaagtattaagaataccagccctgatcccatgaaatttacattctgatgggataaaggtagatagtagactgggcatggtggctcattcctgtaatcccagtactttgggaggccgargcgggcrgatcatgaggtcaggagttcgagaccagcctggccaacatggtgaaaccccgtctctactaaaaatacaaaaaaaatgagccaggcatggtggtgcgcacctgtaatcccagctactcaggagtctgaagcaggagaattgcttgaacccgggaggcggaggttgcagtgagctgagatcgcgccattgcactccagctctgggcgacagagcaagacttcgtctcggggggaaaaaaataaataaataaagatagtaaacaacagaagacataaatatgctaattagacatagcgataagcactatgaagtcatttaaacaggacaagatgacaggaatggaagggagcctatttttaaaagagatgccaaggaatcatctctgaggaggtatgatttgagctaagattaataagccacaaatgaaccatctgtgcagagttctgagggaagaatgttccagacagaggaaacagcaacttcagagaccccaagtttgtttacagttatgttctagaaattcttctaactctagagaataatatttaaccttttctgataatttcatagttgtataattttaccacctggcatataataatttgtaataaacatttgaagactgttcagtatgtttttgatattcagtaaaatcgattatctgctgcaaagtgagcaaggatgagcttggagagaaataggttagagagaagakgggataaaggtgtggctgattttcaaaagatttgttggctaaccaggagagtgacgtgatgacctggtttatatttttaaaacaatgctcaggctgctctgtggagagcagttatgggatgacctgtgtatttggaaaagctctcctggtcacttacatgataatttccaattgctttgaactttttttgttttttttttttttaaacactgtgtctcaccaaatcgcccagctccttccactgccaataagacttaaaatgtttgattttgttgttagttatttatttgctgatgtatatactatacatttttatagttctggggtataatatttagctttttttgatcatcctgtagtcatgattttagtgcctagtatatgctaatttgtaactaatatttgaagactgtttttcacttatttttcaagatttaataaagttataatagtttcaggccaggtacaatggctcacacctataatcccagcactttgggggtcaagatgggaggatcgcttgaggccaggaatttgagaccagcctgggcaacaaagggagatccagtctctacaaaaatttaaaaaattagctgggcactgtgatgcacgtctgtgatcctagctgatcaagaggctgaggcaggaggattacttgagcctaagaggttgaagctgcagtgagccactgcactccagccttggtgacagagtgagatcctgtctctaaaaaaaaaaaaaaaagtttacagtagtttatacttgatttttatttttatgattcatataatttcatgaactttttgaaactactttcagagcttttaaaatagattaatattaggcttaaatatttaaaatgtacaatttgaatattattgtgggagaccgtatttattttgacttagtatgtttgtatatctcagtatttttttatctgcagaatgaatacacttagaactgaaaagtaattaaaactttaatataaaacatgtcatatctttgttcattactctatttacctatcattttacttgaaacataaaaactcaattgyttggaaatagaatctaaaaaattttaaaaaagaaataacaaaaaagaaacttaagagaatttagtaaatcctatgaaaattctcatgaaatgttgttgaattatacttaaatgattgaaataaggcatttttttttcaaggttggctgttgaaggcacgaatggaatagataatcatgtacctacaagcactctagtccaaaactcatgctgctcgtatgtagttaatggagacaacacaccttcatctccgtctcaggttgctgccagacccaaaaatacaccagctccaaaaccactcgcatctgagcctgccgatgacactggtaagcaaggctatttatgacaccttgtttaaaggaaaagtaaatgaagtttatgtatccatccatgcctacacttccctttttgtgtagtcttttttttgagacggagtctcgctctgtcacccaggctggagtgcagtggtgcgatctcggctcactgcaacctctgcctcttgggttcaagcgattcccctgcctcagcctcccaagtagctgggattacaggcacccaccaccacaaccagctaaaaagtttttgtatttttaatagagacagagtttcacttttttggcaactggctggtctcgaactcctgacctcaagtgatctgcccacctcagcctccctaaagtgttgggattacaggcatgagccactgcacccagcctgtgcagtctttcttaatcttctagtctatgataggaatttaaaaattacaatgcctgaaatttttcctaataatttrtaactttctggattatttaggaagatatttcaaaaatattttagaggtcagaacttttactgagcaagtgcttatatgagagctagattcttaagctttgccacaaaaaatactatgtaattcatgatataaaatatatttctgaaagaactttagttaattcattgatttctaagtaaaagtgagtaatgaatggttcttttatcccatctttcagtatacaaatttattattcttggcatctaacttggtggaaaaatgtactgcgagttgaatagctctcagaaagtttattttccaaaagtaagcattactgtattatagaaggaatgcctaaggaagatgtcctctataatccttagtggactcatttataagattcataaattgttttgtttggtcattgtatattaactctttcaggtgagtctcctgaaacttaaacatcttaggacgtgtttaagattattagcacacatgttgggaattaagttgaaatcctggtctttttattcaagagcgtatgttcctccctgtgtttgtctatttatggaagtattcagaattagaaacatsgaaagaagcaattcagtaattacattaaaatagatggatctttttgataatgagtcttttattttttgagatggagtctcactctgttgcccaggctagagggcagtggcaggatttcggctcactgcaacttctgcctcctgggtttaagagattcttgtgcctcagcctcctgagtagctgggattacaggtgtgtgccaccatgccccctaatgtttgtatttttagtagagatagggtttcaccatgttggccaggctgatctcaaactcctgacttcaagtgatccacctgtctcagcctcccaaagtgctgggattacaggcgtgagccaccgtgcctggacagtaataagtcttaattgtgtatttttacccaaggttggtgtttggggagatgtttaccaagagctgtctgagagtttttgtaaacattgagaactgacacatgaatgatattttcaaaatttaatttctttaataatgctccccttaaaaaaaaaaaaagaagtagactaaaatacggtttcccaagtactcacagtaggtagaattttttagtcttaatttaaggtggctagaaaacaaagagaagaatagatacaattatggtgaaattaatgagcaaagttcatgtattttctgattttcacctactttctggtaagaacatttgtctctgagattcctattagcaaagcagaaaaggaaatattgtcttggattattcagattatttctaaattaagaacagactagttaaaactgctactatttctaatacaggtggagtgtctctaatctgaaaaatctcaaatctgaaatgctccaaaatctgaaactgtttgagcattgacatgatgctgaaaggaaatgctcgttggagcatttcagattttgaatttttggattagggatgctaaactggcaagtaaaatgcacatattccaaaatttaaacaaatatctaaaatctgaaacatttctggttccaggcattttagataagggatattcaacttgaatatggatttggaggttttgatcttattcctaaaatattcagctgatggaatacattggtgaaagtatccattgaccactaattagttgtatgttttggcatttggatgtattcagatgttgatataaaaaggagacgaaattgaggctttcctcatcatagaatcttatttatacctctacagcttgtctgatactttatagattctttccattggtaataagttcagttctcgcatttctttcttatttattcttgcctaaaattttaaggtaaaaataaaatggatgtgaggaacatgaaggttccatcataaataattctcatgacattcatagtaactgtaaggaaatctatgacaatcggaaaaatagtgataatagctcatatttgtgccctgcatgttctaaatagtatatatccattaactgatttatctctctcacagtaactcyttgaaataggtggtagtatttttccttttctctgatgaaggaactgaggcactgagagggcacagctaggaagtagaagaactgtaattgacattccgctatctggctgttgattctgtgcactttgccttcttcctattcattttgatgtgtgtggtttttataggatctcaaagctatgctgttcatcttttatactgctaggcttcacacagcattcccctagccttttcaccacctctgattattgctagtgacatctgacaaaacaatctaactgtcatcattctattggccggtttacagaggcttccggaacctgctctgttggtagcagccatttaactgatgtctttttgtatgattgttcatcacttaataaaggatgaattcaggtatcttttcaaggagtgggtaatccctgtccttttaaggtgttggtataagatggcattactttttctaattaaggatttcaaaaattagcttttgtttttggagatgggataggggtgtgcatattctatgtgtaacataattaaatgcttttaatctcttaatctgcagttccacaatcttgaaatctctgaaaccaaaaggatttttttttttttttttttttggtaaactcatttgatggcaaaatgactagaactgatgaaaggctatttatggttcttatttatcatggctactgtgcatatctctacatttcgctgcagaaatattaatgtatttaatcacgatgtgtggcccctaaacctcctccaggcatagtgtaatatacaatatatatgccattacctttgtttgtttgtttttttgagacagggtcttgccctgacttccaggctggagtgcagtagcaccatcatggctcactgtagctctgacctcctgggctcaagcgatcctcctgccttagccccctgaatagttgggactataggcatgtgccaccatgcctgtctaatattaagattttttgtagagatgaggttttgccatattgcccaggctagtctcaatctcctggccccaagcaatcatcccacctcagcttcccaaattgttgggattacaggggtgagctaccatgttgtccactgctacctttctaaattccaaagaaagttatgaattctggaacacacctggcactttgaggtttcagattaggaattgtgggtcaatactaaggggtttaagacaaacgatatatttctgtcaaagacattattatatatgagggcttccacctcccccacctcctgttcttttgaagcttgagtaaggggatccatctgacggtttagttgctatgaagattggcaggtattccaggttaaaatgggaggcagtcatgatgtagtaaaaagattagatttagcttctgacaggaggtaacgtggtgtctcagctcaaccacttgccatgttaactctgtaaccttggacaaattgaacatcctcaaaatttatgaaaagaggataatatgcgactaccttataggacagttttggaggttaaatgagataatctaaaacattcataatagtccttggagagtggtatttaagaaaaatatattctgttccactttgttcctctggtcataacttctagtgtcaaataactttttctaatatatagttgttattttattaataaagtagatcagagctcagtatggtgagtttcagacagaagtacatgatatcacaagtttattatatttttttcttagctctttattctgaagtaattataaataaacagaaagttgcaaagaaatgtatgggaaggtcccatgcacccttcaccagcctcctccagtgttaacatcttgtataactattttgtacaaaatcaggaaattgacatgaatacaacccatacagcttgttcacatttcaccatttctacctgtgtgtgtatgtgtgtgtgtgtgtttctatacagttttgtcacacatatggcttcatgtaccaccagttcaatccagrtacagaactgtagcatcaccagaagactccctcatgatgtaccctctttaaagctacatccactctcaagtgtgaactgaatgttaaagaaacttgctgtgtatatgcaagcagtcatttctcatgtcatagttttaaaatggagtaaaaatggtattcactctagtatttctacttttttcttctttatttgaatgtacttttagggtgaggacaaatacgtggtgctttgagatggatataccataaagttcatgtgaaacttaacctctcaaagattaaacatgaagttaggaagctatgtcttgtaacccagaagtcataatggctgaaagtaaggcttgggagatgttcattcagaacccaagtcagtgggtgtggtcttatgtcttgtggagatgagatggtttgcataagcttctgctatcataactattacataagattttaattttttgccccgtgtttctgcatgagcaaggagcctaccatcctgtccttcctctttccttttcctttccttcttttttcggttttatctgttcaatctttcttatatccatttgtcaacagatgtttattttgcaactaccataggctgcacactgccaggtggatgggcacataggtatcagagtttctcaatttcagcactgttgacatattggcccaggtaattctttgttgtagggggctgtcctgtgcattatattaatagaatgtttagcagtattcctgatctgtatccactaggtgccagtaatatcttaccttctcctagttgtgatgaccaaatgcatttacagacattactaaatgtctttggcggtggggagagcagaatcttccctagtcaagaaccattgatatatatgaacagtaatctctccagtcaaatattattgtggcatcttaatgcggttctgagcagtattgaagaaccaacatttgttgaattattgaatagaaataatttgtttctaagagttttttttaaattaatagactttatattttagaacagtttcagatttacagaaaaactggggagattgtagagagttcccatatgtcctcccatcccactcagagtttttgtattactaacattttgcattactgtgatgtttgttacaattaatgaaccattaataatacattgttattaactaaagtccatagtttacattaccttatattaactaatgttccttctttgtattgtactggttctgtgggtttgagaaatgcatatcgtcatgtacacaccattacagtatcatacagaatagttttactactctaaaatttgtttcatttgtttatccctcaaaccctttgcaacagctgtttttaaatactggctctatagttttgtcctttccaggatgctacatagttggagtcctacagtgtgggtagccttttcagattggcttctttcacttagcaaggtgcatttaaggtttctccatgttttttgtggcttgacttctcatttctttttatcactaaatactcacttattataaaggctccttggttacttcagttttttacaattgtgaaaaacattgctrtatacatttgtgtgcaggctcttacgtgaatataagtcttcaattcagttggattgaggagtgagactggtgggttgtatttttaaagtatgtttacttttgtaacaaacggccaaactgtcttccaaagtggctgtactcctgcattcccactgcagtgaatgagaattcctagtgctttgcatctcaccaacatttgcatttcaaggagagttgtttattgtttattattattttaacaatactgaatcttcccattgagagatattttatgtctgtattcattctttttagtaatgttttttaaagtgttttcttcacgctggttgtgcagtggcttacgcctgtaatcccagcattttgggaggcccaggctggggaatcacttgaggtcaggagttcgagtccagcctgggcaacataatgaaatcctaaaaatgcaaaaaaatttagccgggtgtggtgacgcatgcctataatccctgctacttgggaggctggggcaggagaattgcttgaacctggggtgctgaggtttcagtgagctgagatcgcgctactgcactccaacctgggtgacagagcaagactctgtctcaaaaaaaaaaaaattttttttcttcggataggtcttgaagtaatcttgttgttgatcttgtgtctgttcattttgctgaaatgttttagctccaattaattggttctaatggggtttttaaaaaaattttcttgtgtattctaaataaataatctatttgtcattttcactacaaatgagttttaccatattctttccaatgttgttatgacttttcttaatggattgtcaaatataatcaatactgaattggcttggtaattgtgatcttccttgttttgttgctgattttaatttattctttttctttttctttctttttttttttttttttttcttcagacggagtcttgctcttttgcccaggttggagtacagtggcgtgatcctggctcactgcaacctctacctcccggattcaagcaatacttctgcctcagcctcctgagtagctggggattacaggcacacaaccaccacacccagctaattttcctattttttggtagagacagggtttcaccgtgttggtcagggtggtctcaaactcctgacctcgtgatccacccgcctcggcctcccaaagtgctgggattacaggcgtgagccactgtgcccagccctgattttactttattcttgatnnnnnnnnnnnnnnnnnnnntcaggttggtaccacatctcgacgccaggggcctgcaaggttttacgtatcaaaataccatctttagtgggtcttgacgggaaaacatccctccgggaaaacgcggggtatcatgtcgccggcgtagggtttggtggtcagttgcgggactgcccatccaccaagcgaaagtgctgatacaggtcttctacctaacttctcgcctgtaccaaaaaataggaaaactaaccaggcgtggtggcgggtgcctgtaatcccggctactggggggctgaggaaggagaaccgtttgaacccgggaggtggaggttgcagtgagctgtgattgtgccactgcactccagtctgggccacagagcgagacaccttctcaaaaaaaaaagttcttaaaatgttttacaattattgtatattaatgactgtaggtttgtgatagataatctagattacttcttaatttttcatgattcttcttatcaggcattttaccaagattttcttgaatgcttttggtttgttttgaaaataatcatatgacgtttatcctttaatctgctaacagtagattttctaatgtagtttcctaatatcaaatcatccttgaatttatacatgatgttagtctatagtcttcttgttctgttgttgttcagtttcagctttgaaagtttacattaccttcccagaataagttaggacactccttttcactttttctcccctaatgtgttataacaccttaaataacataagaatgatctatccaataaaggcttcatagaattttctcaaaaacctttctgagcctggagcctttaggagggatgatattagaactttcatcaccttttccattgctgctctgatttgtctttttttctttcccttgagttagtttagctaatttcaaactcattgatatgaaattgtacgtggtatttctaatgttatttatattaaacatgttttctttataacacttggaaaggtatatttcatggtttctccagctttcctgagtaaaaaaatcatatgcatttgttaaaaatgcagatccccaggttcttccctagagatttcccctagagattcagtaagtctaggatgaggacttagatactatattttcagtaagttctggagtcttatcaggtgcattaggaaattctgatcttttttttgggtcttttgaccaaaattcattttcttctacttactttttttttttttttctgtatctggaatgaattctaagctcttttgttaccattctttcttacatctttaggtacttctttggccatgtccagtagcatttaatctgagtgttttctttttgtcattaattctcctaaaatttgtgattatgtctccctctgccatttccattagaactttgatatatggtcttccagtaggttttgttctgtaatctattcacccttacagttttaatttgactcatttttatagtgacacgtagtcgaactagatcaatcacacttaaaatgaaaattaggaaaactgtgtcactggattgcagtactgggttatttcttgaaaaagtgtagaatgggttcttgcaacccctatagtactatcttaagaactgatgccatcatacagttcctactattggcaaaacagttcgtttgatgttagctaccacttacacaagggaagggcgattgaaagggatcatttttcagagtttagatggcccatacagacttcctctcagaattgatgatttggagggaaaacactggttatcttaatgctggttcctctctccttaaggttgttattattatacatacttaaatttttatcatttacatattcatccctgaaattttgagcaacaaaaataaaatctccattttattttatgttacatattttgaaaatattactttgtctgctgtttggagaatggattgtagttgcttagtctggattaggctctgaataagtgtagtcaattgattaggtaattgattgctttatcattacttgatagatgattttattaattttcccttctcagttaatggagaatcatcctcatttgcaccaactgataatgcgtctgtcacgggtactccagtagtgtctgaagaaaatgccttgtctccaaattgcactagtactactgttgaagatcctccagttcaagaaatactgacttcctcagaaaacaatgaatgtattccttctaccagtgcagaattggaatctgaagctagaagtatattagagcctgacacctctaattctagaagtagttctgcttttgaagcagccaaatcaagacagccagatgggtgtatggatcctgtacggcagcagtctgggaatgccaacacagaaaccttgccatcagggtatgttaagctttttaatgtctgacttgcatttaagtagcaactctgttaacatacgattattgaatgtgtgcataaaatgttttcattgttcagaactttgaaatctaagttgggatctgaatcatactatttatttacttgctacaaaacaagtactttttgaaactaagaacaattgctcatctggttgacatatatgtagtacgaagggaaaagaaaaaacctgatgttaattagcaagaccctcttaatttgattcttggtttatttctacttttcgtaagagtgaccatgatactccatataatatcctcagttctctggcatccttggtgatctgttttccagacctcatactggagagcaaatagctcttcttttcctcagctaatattgagtgctggggagtcacaaaccttgctgattggctctattaaaaatgcagtttttcattgctggttagtaattcttaatctcttttaagtttctcattataattactcaacttcccatgattttctttaaagagtattctatatgtgtattccattcggtaatttctttgacctttggcactgataatactaatattaattaatgattaattgtctctgccttcaagaagcttatttagtgattcacagttgtaaacgtgtacagtatatacagtacagtcagaaagtatatatggacacgtgctttccaacacagtttacagtgatcagaatgtcaactgttgtagctattgaaactgcacttctrgatgtctctacactattgtcttcattttgttacctcagtcactatgttagtgtacgttggttttttttttggaattgtttttttttttctcagtgccctttactggctcgtctgatgttgtccactgcttaattacggtttcagcctttggtcttcctttgtgtgcttaccccagtagatctagcactctccattattattattttggagcagagtttcattcttgttggccaggctagagtgcaatggcacgatcttggctcactgcaacttccgcctcccaggttcaagtgagtctgctgccttagcctcccaagtggctgggattagaggcacccgccactatgcccagctaatttttgtatttttagtagagacggggtttttccatgttggtcaggctggtctcgaactcctgacctcatgatccacccgccttgcttcccaaagtgctgggattacaggtgtgagccaccatgcctggccagctctccatcattttaactattaaatctatatgttcaggccagacttttctttgagcttattttcaactacttttccctcttctgtttcctggaaatgtttcagaccctatattagctttcctttccctctcaaaaatctcttgtcctgtgtcccatgtttggtaaattagtcaattatcctagtctctcatgtgccagtcactgtggcaaagacatataagaagctgttcttactgtcaagaacctcatcgtctaagtggtgggggaggggaagagaagtagacaatcagccagcatacagtacaattaaagctatgccagaggtaagtttaggatgccatgacaaggaatacatgcagagaaggaatgggaggagttacctgcgccgttgacgtcaaagaatactttcgaaagctatgacacgtcagtggattctgaaagaagaggaggagttagcaaatagtggaggcacgagtggtgaaaatttcattttcagtagagccgactgcacattcagattcctagcacccatgaaaatgagtatgctgaacccaggaattattattttgttatagtttgagttcagcatttgaggcagcaagatatataatgctgaagagaaaacagccctgtgaagaattttgtgtgatttcgaagggtttggaagttttttctgaaaaccacgaataagcattaaagaatgtaaagcaggggagtggcataatcctctttgcttttattaagatcatttttgcagtggtatagacagctgaggagttaaggagttgggatagcagccaggctgttttataaatgagggaagccggcattccagttcaaaacagtaagtacataaacctaattctgttgagaccagataaatgcttcagcagacttgttgtcaccacttatgatctttgtattagaattttgcagtaatctatattagtgtttttcaaattgtagagtgcaacccgttaataggttatgaccagcatttgaacacataatgaaataaagaaatataggcgagaataggaaatattggaagatgttaaatgtagtaagaataagcattgtttcctgaaagtttgtttttctgtgtgtgtgtgtgtgtgtgtatgtgtgtgtatgtaagtaaaatcagtagataaatagcaatctggtatacacagagatatttatataaaacacacttcttactgtgtaaactgtggtcaaaaaaagtttaaaagccactaatccaggggagaaattaagagagcctgaagtgaggtaaatgctaatattttaggttgacataagatgggtcttgataagttgtggggagatagaatagaaaaagagtggaaccaaggtggattcttctggcatacacagcaccaggctgtgtaaccctttgagtcagcagttttcaactccacatcatcttccctctttgcttaaaaatcttaccttagttcctgtgttttcttttgtttggtaacttactgagtcatttagctaacaacaggataggactatgggtgcctcaatcctgttgattgtaatgtacagccaagttgagaactgctacttcaagttcttttgttaaccctttactctccacattttttaattcactttatatagagatatgtagatgaaataaaaaaattctgtgtatcaaaatctaaagtatgcatcagtgaaaaattggacagtgtattaatattgagtacttttcagagagattaaaaatacattctgaatcccccccccatccccccacccccgcccctaaatagcgattaggcaactgggtcatggcatatttgactgaaataatgatagaatgttggacttagggtaggagagtgatgagaaagtgttctgtattttgtagggcatccagttgatatatgtacctcatgccgtataccaaggaggcagttatatgtacagttccagaactgaagaagaatattctagcctggagataacatttgagtgttatgccaagcacgattttgcctaaagaactttgcatgtgctcttttatgtattctcaaatatactcaggttttgttaaaatgttacctcattccagaggtgttttttgagtctcctgtccaaatcaagccagtttccccacatttccgtatcctgctttattttccccaacattttatgttgaaaatttacaaatgtacagaaaattataattttgcagtgaaaacccatacacttcccactagattttacaattgaccctttattgtgcttgccttatctcatctcttcatctcttcatccatctgatttttagtgcatttcaatgagttgcagacatcaatatgttttgcccctcaacacttcagcttgcaaatcattaactggaattcaatatgttttaaaatttttttagataaagatgacaaagaaagaaaaacacgagtcttgaatgtaccattatgatgaattttggcaaatgcgtatgtctgtgtaactcaaatctttatcgagatacagaacattaatatcaccctagaaagttgtgattctgaggcaatcaatattctaattttttctactatagattaattttccctgctgtagaacttactatagatggagtatgaactcttttgagtaggcttcttctaatcagcatgatgtaacctttattatttttctagcacttaaattatgtgacacacagtgttattatctgttgtctctccactagactgaagggagattttattttgtctatttctatattcttcgtgctcaaaactatgcctaccgtatagcaggcactcaataaatatttgttaaataagtgaatttgtgctacattaaatgatttagaatgactgagcaattgggcaaaagctctggctggtaaatgcctctggaagaaatggttaacaaggtcaaaagccactgaaaaattctaggaagataagaactgaaaggcactcattgaacttaattacaaagagtttatttattgttgacccatgacagagtgtggtttcagggaaataataagagctgtattcaaattgctgtgagttgggagtgaatgagaggggaggaagtgtgatagaggactctttggaagcatgtgaactaatgtagaaaactctttctgtgtgaagacaaagggaaggaggaatgtttgaaagaagtgagcaagaggacatacagaactgaggggtagattgttttgtaaaatggaagagactgacaggttgatctgctgatgcagtaggtcagtggagggagagattggccaatactagacagaaagaggattaactctgggattgtagttatgacaaggcagcaagcagtcttactgccaacccctgttatataagtttgaagccagaagttgcccagtcgttcaccaaattttattatttttattgtaatgtatttttcaaaattcttccacatttctttttttttttttaagcaaagtctttgttcagtactaggttttgaaaatttgtatataatgttttagtgagacagagagaccatacctaaacactaggtagaagagggttatggttgaaggtgaagtgtggcagttataaattagagttctattgagaattctcattaatcagtaatttggtaatttgcacctagttgaggggtgttcatgaattttcactacgggattatctggtctctggccaaatccagcccaccacttttataggtacagctctagcaggctgtcactgtgagtcatggagacaaagccagagcagccccctttacccctgtaccacttccccctgaaagtaccttcctcccttgctgcccaaggcctgctctggtcaccaccacattctggggactcacttttggtagctaccaggtcccaagccttggacacataccctgggagtgacatctcagcacggtgatacctcttgggccagctgccaggggaggagagaagggcacacacagggattcaggagtccctggggcagacagtgaaattggccaggctgctcccttgtggaccaggaactctgtgttctgagaatgttgtcagcagcgggaactgggtacacaacatgcccacaacccgggatgccccagcacaagcagagagggtggagcaggtcaggagtctctttttatgtaagtacctacataatcatcttgattatacctttggttcacaaagcctaagatatttaccgtctggctctttgtagaaatttgcctactccttatctagtgcattatagatctaataaagtgcattctagaaaatgcactttagaaaattagaaataagataaccgaaagcagttctgaatataatgttctgtgtagcaagaaatttagtttgagaaagacaaattctatttagaacaaacacactgaaatctggaagtgatctaaaagatcagtgactagcattgtgcttggaacgtaagtgcttactgaatatttgttagatggtaagttagaaatacttgaagttaactcaggataaaacagaaaagggcttcatagcccattgtatggatggagggcttggttgtgtttattttttcccccaattttaaaactgtttctgattacaaaattaagacatgaccaaatacaatatttaagtcatatagaaatattaatagttcttaagctcaccactgagaatggtgtctatatatattattccagtagcaaatatttgagagccttgttctaggcatgtgcagcagggcaggagagctcaaggctctgttgtgtagcacctgttgtgtaaagcttgtatttcagtgggaagacaaacagtggccttatgtaaaaaaactcgttgagtaatgtccgatagtgacaagttctatgagacaagataaaagtggatgaagaggctagagagcagctatataaattattattttgcataaaatattttcataaatagaatcatactgtatatagtttttcagttgcttttaaaaaaaaacttagtcatatttccacatcagtacaagtaaattcacacattgaccaaatatttaatcgacaaatatttattaaactccttgtctgtgtggcaggctctgtgctaggtgctgttagtatactgatttgcaaaacagwtgaaggcccaaactttgtggagcgtatggtctaatatataggtctcccttaattcttttgaatggtttgtagcgtttccttgtgtattatttattgctatataataaattaccccagaatttatctcacacagtttctgagcatcaagaatcaggaagtgcattagctgggtgcttctacttggggttctcatgaggttgccatcaagctgttggtgggggctgcagtcatttggaggatggttaagtgcacctcacttagcaaacccaagagagctggattctggcctgtcagtgggaaaagctcagaatatgcattggcagcattggatgcctttggaagtggtagtgaagatgacactgtaaatggcaggactgaatgtttgagaaaccctaattcccttccctgcagccagaacttctgctctgcctaggggttttctcactggagatacttgacgcttgggaacaccaggcacattggaggtcagagatactgtcctaaatcagcagacgtaagtgagcctttgaaaggttagtaagtgaagaaggttgtaaagtaaattttcaaatacacacccaacacagatcccagaatattgacaaccaggattttacctcctcaaccaggagactaacagtatcttctattgaagacctctccaaaacactgaaaatactaatatagattgttctctaacaaaacagtcccattattatcactctttaattaatccacaatccacaagccccacccaggcacataaaactcccagtcagttttcagtgcccttctcattagatatctgagggaaacctcttaatttgaaagatagagatcaaaaaaacaacctagaaaatactgttttaagatatcagactagggctgggcgcggtggctcccgtctgtaatcccagcactttgggaggcctgggcacgcagatcacttggtcaggagttcaagaccagcttggccaatatggtaaaaccctgtctctactaaaaatacaaaaattagccaggcatggtggcacgcgcctgtagtcccagctactcagaaggctgaggcagaagaatcgcttgaacctgggagacggaggttgcagtgagctgagatcacaccactgcagtccagcttgggtgacagagcgagattccatctcaaaaaacaaaagataacagactattttaatatcctctgagggataaaagtagatacaacatacatacaacaagaacccaatgctataaaaatggaatactcaaaggactaaaaaactcttggaaatttaattcagtgtgaaatttgactgataaaggtaaagaaatttgccagacagtaacacataaggaccagttcagacagtctgataagaaaagttctagaaagagagaaaatgggaggaagtccttaacaaaataacaaacacaaatttctttattgaagaataaacacaaatttcttcattgaaaagactcactaaaaatccaggatgataaatgaaaacagatctattttaagacaatttgttgtgaaaattttagtacattggggccaattaaattctaaatattttcagcgattgaaaaagcaggtttcataataatcagaatggcatcagatttcctagaatcaacacgaaaagctagaagacagtggaagagagtgggtccatgccttaaatgctgaaggaaattatgcccaacatataattctgtatccagccacactgtttagtgtttgcatagaataaatacattctatgcatatcctaggtttccaaaagttcacttcttatgtcttctttcttagaaagctactaggacttgtgttttcccaaaactgggtagtgaaagtaaaagacgttggaggcaggaattagagggtctgctaggagaggagtgaaaggaatgccgcacaatgataaaggaaagcccaaactggcctcagacagcactcactctagactagaagctaatcagaaggcaggtgcaatcatagaacagctaatgagcttgaacgttttaagaggagatttatgcaactggaaaagtatttggggtttaacgataagaatgtagacaataagcaaatggaagtggagataatttttctagctaatagtattttttaaaaaaagaaattggggtatgttccatggctcatctgtggggagagtttacatagtcataatgataactgtaagggaaggtacaacatatgtgtatatttggaatggttgggaggagggtaagtgtagatgtgtatgtgtgcaggaaagagacctgcagcttcacctttcctaataaaaagtcaatacattatgtttgaaattaaacaaatcacaataagtcaaggaagttaataagtaaaagaagtaaataccaaaaaaatggactgaaacagttgaaaatgttgccttggggagtggaaaatgaagtgaaagagacagtaggtactgttgttttttgcaataagtctcacagactgtatgactctgtttatgtgaaggtatatataattatatagctatgaaggtatattttaaactatctgaaagtatatgtaattttgataaaaaattaaagctaaattaaaaatagtaaaggatatttgtgaagaaacagttgaaaccaggaaattttgctgtaggacagcaataaaaattcaaggactgcttatgggaattattacctaaaaatagcaaaagtgaaacttgatcaggtttttaggtattcatttggttttggtagttaagctttcatacagaatagcccattgttacatgttagacatattcctgacaggcctttaaaatgaaattttatatttaactccttctttcccgtgagctttttatataaacaaataaagtaaatcataactttcagattgtctgattttagtgaaatgctttataagaaatatctaagtttttacagtactgaatatcatgagtgttccagtgtaggatataataggcaagtttaataatttttgtgatcccgagtcagttctgaacttgggaatctttatggttactacttaagcattttgtgacttaggtttgttagatgcaggctaaacaattttttaaattttttgtgtgcatttgtcattttaagtatgtatgtgtttatgggtgcaaactagggagtagtttcagtatatatggttatcgtgtataaaaataatttaaagaaaataagcactcttaataaaaaaataaatttaattgggttcttttttgggggggttctcccagattgatttaatatttgaaaataggccgggcatggtggctcacgcctgtaatctcagcactttgggaggccgaggcggaaggatcacgaggtcagcagtttgagaccattctggctaacacggtgaaaccccgtctctactaaaaatacaaaaaattagctgggcgtggtggctggcgcctatagtcccagctacttgggaggctgagacaggagaatggtgtgaacccgggaggcggagcttacatgagccaagattgcgccactgcattccagcctgggggacagagcgagacgccatctcaaaaaaaaaaawttttttttgaaaatataaatttaccatattaacaaataatcgggaaaagctatttgatcctctctcaaaattttgcagatggggaagggaggtagaaggaaagagtgctggattctttatgggagatccttgagcctccctcttggtgcaggacaacttatcaaaactcaccattccaagttagggcttcttgataagcactcacatttaaaaacagaatcttttattgtgaaacatcacacatacacagaaaagtactttccttcaaaatatatagatgaaactgatttatcacaaaatacacatttgtaaccatcacacaagtcaagaaagagaacattgtcagcaccccaggaatactctctcatgtcgcttccgaaacactgccttctcgagttcttgtgtttaagaaaaaggaaaatattttctggttattgtattttaaaattgaaaactagtgtcttaaactcagaagtaccagtttgtatttatttatttatttatttatttatttatttatttatattttattttatatttttaagacagagtcttgccctgtcacccaggctggagtgcggtgcaatcttggctcactgcaacctctacctcctgggttcaagcagttatcgtgcatcagcataccgagtagcttggattacaggagtgtgtgccaccatggctggctaatttttttttttctttgggatttttagtagagatggggtttctccatgttggtcaggctggtcttgagctcctgacctcaggtgattcaccctccttagcctcccaaagtgctgggattacaggtgtgagccaccacgcccggcccaccagtttttatttttaaaaattattcttctttaccatattaagaagactaaagagaaattaacgggaatcacagaagaaaaaatgagaatgggagaaacaagagattgagagtcttcaaaatagaataggaaaaagataaaaacgtcatttccataaattcagagacctaccaaaaccagaaccaaaattaggatagatatgcacaatgaaaagatactgtgcacacagatgaaagaattttcatggggcagtatcaccacatatttctttaaggcgatttctgctaaaaatcttttagatgggtacttttgaaattatagcaaaatcagtatattatttcatagacactttgtgccttggatttaatattaagttgaaggtttcttcattttttttttttttttggaaactgaaaattagtgtttattgaatacctaaaatgtattcagacaaaaatagactagaactaattagcataattattgtaatcctagataaatatcaaatgtcagaaaaagggtaatttttatttttatttatttatttattttatttatttatttttttaattgatcattcttgggtgtttctcccagagggggatttggcagggtcacaggacaatagtggagggaaggtcagcagataaacaagtgaacaaaggtctctggttttcctaggcagaggaccctgcggccttccacagtgtttgtgtccctgggtacttgagattagggagtggtgatgactcttaaggagtatgctgccttcaagcatctgtttaacaaagcacatcttgcactgcccttaatccatttaaccctgagtggacacagcacatgtttcagagagcacagggttgggggcaaggtcatagatcaacagcatcccaaggcagaagagtctttcttagtacagaacaaaatggagtctcctatgtctacttctttctacacagacacagcaacaatctgatttctctatcttttccccacatttcccccttttctattccacaaaaccgccatcatcatcatggcccgttctcaatgagctgtttggtacacttcccagacggggtggcggccgggcagaggggctcctcacttcccagaaggggcggccgggcagaggcgccccccccccacctcccggacggggcggcggctgggcagaggcgccccccacctccctcccggacggggcggctggccgggcgggggctgccccccacctccctccnnnnnnnnnnnnnnnnnnnnnnnnnnnnnnnnnnnnnnnnnnnnnnnnnnnnnnnnnnnnnnnnnnnnnnnnnnnnnnnnnnnnnnnnnnnnnnnnnnnnnnnnnnnnnnnnnnnnnnnnnnnnnnnnnnnnnnnnnnnnnnnnnnnnnnnnnnnnnnnnnnnnnnnnnnnnnnnnnnnnnnnnnnnnnnnnnnnnnnnnnnnnnnnnnnnnnnnnnnnnnnnnnnnnnnnnnnnnnnnnnnnnnnnnnnnnnnnnnnnnnnnnnnnnnnnnnnnnnnnnnnnnnnnnnnnnnnnnnnnnnnnnnnnnnnnnnnnnnnnnnnnnnnnnnnnnnnnnnnnnnnnnnnnnnnnnnnnnnnnnnnnnnnnnnnnnnnnnnnnnnnnnnnnnnnnnnnnnnnnnnnnnnnnnnnnnnnnnnnnnnnnnnnnnnnnnnnnnnnnnnnnnnnnnnnnnnnnnnnnnnnnnnnnnnnnnnnnnnnnnnnnnnnnnnnnnnnnnnnnnnnnnnnnnnnnnnnnnnnnnnnnnnnnnnnnnnnnnnnnnnnnnnnnnnnnnnnnnnnnnnnnnnnnnnnnnnnnnnnnnnnnnnnnnnnnnnnnnnnnnnnnnnnnnnnnnnnnnnnnnnnnnnnnnnnnnnnnnnnnnnnnnnnnnnnnnnnnnnnnnnnnnnnnnnnnnnnnnnnnnnnnnnnnnnnnnnnnnnnnnnnnnnnnnnnnnnnnnnnnnnnnnnnnnnnnnnnnnnnnnnnnnnnnnnnnnnnnnnnnnnnnnnnnnnnnnnnnnnnnnnnnnnnnnnnnnnnnnnnnnnnnnnnnnnnnnnnnnnnnnnnnnnnnnnnnnnnnnnnnnnnnnnnnnnnnnnnnnnnnnnnnnncgggaaggggagagggagaggtttcttaattcttgattcaatttctgttttctgataatttggaattctgtaagtaactttttaaaatgtggggtattctcttccttttctgctaactatactttgagtttccaatactgtaataaaaagggaataattaagaggttaaaaaagtactaataattgagaaaatgaacacttctgtatatatatataatagcctttatatatatagctgtgtgtgtgtatagtcttttaatgtaaagcttatctgtaatttttctgattataaggaagagtcatttttaagattgtcctagtgtgttgtctcttactgttatttttgtatttttattaaaggtgggaacaaagaaaagatcctcatggtagaacctattatgtggatcataatactcgaactaccacatgggagagaccacaacctttacctccagggtaatatagcactctttatgcatttgtaattatattttatcacacatgtggtttttaaatttatttagtacagcgtaatttgattctttcattctgcatatattcaatttctttacatttccttatataaataatgaatgttcagtcaatgagattagataatctgtagggcttcctcaagagactgtcaagcattggcatgagttactgagagaagttgcaaaatttggtcagttgtcagtccttctttgtaatttttttaaggaaagaaaggtagtatttaggacagtttatatgtatggttctccatggatagtgatctaaactatgttatttcataagatttaatgacttaaatattaaatgacttaaaggcccaaatgatttaatgacttaaaggcccaaaactatgatctacaaagattgccatgagtgaacttatacctaaaattgtagaaggttttaaattaataaagtttttattacatactaaaattcatgctattaggctgtcattcaaggccattcacaaacgagtcttcctttacctttgtattctttcataactgtctacataactgcactgatagctagtcgaattgtactgtttgcattcatttactcacacattctatgtgtacctggaatatatttcttacatactcagatttcccttccagattcaatttaaagcccaccattttaaaacacattcaaaatctagaaaattcaaggcagagaaatgttatttttatgggatatttctcttttatggaataaagcactcaggccttgaccctacagtgttaaatgagaacgtattggaaaacatggtgccgatattgcaatatagcaaaccatgaagttcattttaactatgacaagatcatcaagttatagtcattcatttagtccattcattgagtgccatgacttggggtttatttcactgaaactgttgtccaaaaattaggcagaggttgtctttaatttcatctttagcgtctattattctctttgtgaccccattgtatttttagtaataagtttaaggaatttataattggttgctgaaaggagtttacaatcattttataaattaatgacaaaaattggtttaatagatcctacatgtgtagaacaggtgggagttggagtgaatcctggaggatgagtagaattctggttggtagagaaatagggaagggtattctgtgaggcaaaggggaaacaaaattcactcatgacacccttggaaccagcaaatagttggttagactctcacatgaggcccttgtaggatctcagggaaatgaggctgaaaatgtggacaattcatttttatgccatgccagtgagccatcatgggtggaatgacatggagtccacctgtgtttcaggaagaaaattggcagcaatataatggcaggaaggtgagttaaaaaagtaataaaaagagttcagttaactcattctgaacatgggcattggctatagagcagattgcttggtatacagcaagcactgtcagtaaatgcttatcaaagaaagaaggagaggccgggcatggtggctcatgcctgtaatccccacactttgggaggccaagaggtgggaggatcacctgaggtcaggagttcgagaccatcctggccaacgtggtgaaacccccatctttactaaaaatacaaaaaattagctgggcatggtggtctgcgcctgtaatcccagctacccaggaggctgaggcaggaaaatcacttgaacctgggaggcagaggttgcagtgagccaagatcacaccattgcacttcagcctgggtgacaagagcgaaacgccatctcaaaaaaaaaaaaaagagggagaaaggatagccagatgatactaaaactgttcattcagtggcctctttttagacagtctttagaaattatattagggctaatgctttccctccccgtaaggggcttaaaacctagatgatgtgttgatagctgcagcaaacgaccatggcacatgtatacctgtgtaacaaacctgcacgttctacacatgtatcccagaacttaaagtaaaattwaaaaaaaaagaaaataagcaaactcttgtagtgcaggactaaacattacagtgattaaaggaaaaaaaagatattagtggtagaatgggaaggtaatttaggtaaaataaatagttcatagttttatatgttttagttattttaacatgtcttgaacttgatatttaaattgagtgaagtaataactgcttttcattttcttatattgagagattattgtttattattgtttacttgtggtagttgggaaagaagagttgatgatcgtagaagagtttattatgtggatcataacaccagaacaacaacgtggcagcggcctaccatggaatctgtccgaaattttgaacagtggcaatctcagcggaaccaattgcagggagctatgcaacagtttaaccaacgatacctctattcggtaattagcaaattgtaagatgttaacataacttcctccctcaggtgtttctttcttttttttttttgctatcccttgaccataatcacatatctattttggtgattttcagaaatggtatagactgtgttacaagatattttttagttaatctttaataaatagtgtttctgatatatataagtactttataatattttaaaatattctagtttactaacataacttatacattaagttttatatcctacggggtagtttcataaatgcatttcttaacaaaataatatttttactaattttcaatcttccacttttataaattttgtttgctttcaacaaaaccagttactttattattttacttagagccagtcttgcagtatgctacctattctgattctcttcccagattctaagaagcaacactcatctgttttgctccatcaaagatatttctagaactcgaaagttttatccaaaaaatctaatgctgtctgaaaatttgaccaattggtgatttacttattgccataagcaaacatccgtgagaggagtggaaaaaacaaaacaaaactcctctgataaatggtgtgatcataggaggtagaaaagataaattttaagtactggacaactacagatagtgttttgaggcaacttgaagaaacctaaaatatagaagctagcagatagaaaggaagtaggaaagagacatagaaagaaaatgtaagtaactttctccaaaatcctgctgcagtctggctctttcaaccacatttttttcagaggttaaatagtaagttctcatttgcaggttgacctactctcctggttatatgtagctagcagggagggagtgggcagcctagtttccatagcgtttcctgctgccttcagttgctggttcttccatgacttgtacagaaatctgtggtaaggttccataatttagctgtatatagtaattataccgtgtggtatatatagtaatatatatagctatatacatccataaaaagtaatacatatagctttgtttttggttggacttatctgtacacatgaaaacctttggtgaacagggcagaatgaggtaacagatgtgtatcagaagaatgttatcttgcaagtaatagaatctccttaaacacattgaggtttaattatctcagtacaacatcaagtctggggtaaaagtgtaagtgctgcattgactcagtagtgtcatcaaggacccgggttctttctgcccttttgctctgccatccatatcgcacttcaggcctgttacttcgtttatatactctgcactatgggcctcacatccatagtctaggcaagaagaaagagaaagaggaattgaaagggcagatggctctgttgttgcaagcccttgccttttttacttagcgaaggatgccctcacyatggccttctgcctatacctcattggccagaattggtcactctaccaactcagctgcagggaagggggaatggaatgatctttatggccacgtttctacctccaacaaaacagggttttggttctcaagaacaggtggaagataaatattgagtataattaactgggtctgttacaagattatattcatcaagatgcatatactttaagaaattatttttcaggtaatgatttttatatttgtcattattatagaattcttgatagaatacttatattttcttcagaatatatttctaggttataagaatggaggcatacataaaaatgtgtttttatgtatgtatgaaaatataaaagatactaattaaaagtttatttctataaatgatactggagttgagtgttagttttattagtgggcatttgttttaaagaaaattgtgataactgttctatttttaaacaaataatattgcctcatttaaacatcataatttcctatatgttcttctcccatttcatcttccctctatagattagtatggaaggactgggagagtaaagtattgatgccagtgtattatttttaaatcattttcgaaaaactaataattaatttgatagttgatagtctcctcttcgtgacattttatgaacttagtgtcttggctgggagcggtggcttacacctgtaatcccagcactgtgggaggctgaggcgggtggatcgcttgagcctaggagttcgagaccagcctcagaaacatggcaaaaccttgtctctacaaaaaatacaaatattagccgggtgtggtggcgcatatctgtagtcctagctactcggttgttgctgaggtgggaggattgcttgagcccgggaagcagaggctgctgtgagctgagatcacgccactgcaccccagtctgggtaatagagcaggaagatcctgtctcaaaaaacaaagaactttgtgtcttgaaattgctatatttccttataatgtggacctatctatctgtctatataataatatagatatatttttgagacaggaaaatccaccacagggcgagatatcaatctcttctcgctctgttgtgcaggctggagtgcagtagtagtgtgatcacagttcactgtagcctccacctcctgggctcaagtgatcctcccacttcagccttccaagtagctgggactttaggcatgtgccaacacrtctggctaattaaaaaaaaatttttttttatagagacaggatcttccaggctggtcttgaactcctgggcttaagtaatcctcccaccttgccctcccaaggtgctgagattacaggcatgagccactgcgcccaaccccttatcatatttttagaaaattattataaaatgtgattctgccacatgcttggcttatttctactttcatattaaaacactgttattttatttctctccctaatcttttctccaatcaggcttcaatgttagctgcagaaaatgacccttatggacctttgccaccaggctggggtaagctgtttttgctaatgatctataagggagatatatatctctccwtatatatatatatatatatatatatawatgttccttattttatatatatatatctcccttatatatgtcccttaacatatatatatcccttataatatataatatatttaatatggattatatattctatatattatatattctgtagaatgttatatattctgtatactatatagaatatataatccatattaaatatattatatattataagggatatatatgtatattatatatgtatatattataagggatatatatatgtatattataagggatatatatatgtattatatatataatatacagaatatatagaatagattatatattaaagaattatatattatagaatatatattatattctacataattatctataatataatatatattatattctctataatataatatatgttatattctctataatatatattatattctatataatatattctataatatataagggatacatatatccctgatatgtttttatatatataatatatattatatataattatatgtgttccttattttatatatagatcctaaatagttattaaatattatactcactttatatttcagaaaaaagagtggattcaacagacagggtttactttgtgaatcataacacaaaaacaacccagtgggaagatccaagaactcaagggtatgtatatacagcagccttaagtcgtcttgcatatatcagtaggtagaaccaaccaaccttgaatgagatatttttagtacctagaaaaggttcatcttgtgattttaactttatcttttagcttacagaatgaagaacccctgccagaaggctgggaaattagatatactcgtgaaggtgtaaggtactttgttgatcataacacaagaacaacaacattcaaagatcctcgcaatgggaagtcatctgtgtgagtgaaaacctgaagttctcctttaaatattgcttagtgagcacatgagatttagtctctaatttatcctcaagtttagcaaaacattttactttttggttcaagaaaacctacacaagtgaaaccttagtatagctgtctttgctctcatttgacaatggatttgcagcatgtaaactatttatgtagtgattactgtgtgccgaggattgttctaagtacttcataggtattaactcattttatcttccaataaccccttgaggtagatactattatttttccctttaccaagtgaggagaggtatagggagcataactaactgtgcaaagttataaggcaagtaatggagctggtttctaacgatgacagtcagtctctgtctagactctgtgctcttaactgccacatcacactgctgcaatgagatggtcagtgaaatgatttttccagatttaaagataccttaattaagcggttgacagatctctccttcattcttactctaaggtgtcatgtctttgcataactaagaaaatagaagcaatcctaaaaggtcttttgcaaagttgtaccaccatatctgtccgtctcctaccatctctcctccctcctgttcctatagatgaactgtcattgttattatcaaagtctcgtccctctgctggtacattcgattcctacccccacttttctacttaattgctccaacagttatcacctttgtgttgcattatcaggttttatttctctacaaaattattcttatcagctgttatttctcctagatataaaaaaaaagcaaaaaaaaaaagaaattacaactcttccctttaccaatgtgttcaatcgcagttcatttttttgttttttttttgagacggactttcgctcctgttgcccaggctggagtgcaatgatgcgatgtcagctcactgcaacctccacctcctgggttcaagcgattctcctgcctcagccccctgagtagctgggattacaggcacccgccaccacacccagctaatttttgtattttcagtagagatggggtttcgccatgttggccaggctggtctcggactcctgacctcaggcgatccacctgctttggcctcccaaagtgctgggattacaggcgtgagccatcacacccagcccacagttcatttttattgctcccctttacaggaaagctacttgcatggttgtctctgtattgctgttcatagtttctcctttaaaccaactccaaggaagttcccctgacactgaatttgcaagggcaccaatgatcttcacattgttaatccaggcgttggtttgcagtcctgcctgatttgacttaccaggaacatttgacacaatacatttctctctcctggcaaaagtagtgctgtgagccatactttcttgatttccctctgcgtttctgttcttctatctttattttgtcgagtcctcctttttttcctaagcctctttttttttttttttttttgktaactacattcattctcttgatgcatcttactcagtattatgcttttaaaacatgtgcctgctaatgactcacaaatttagctcagacttctcacttgaaattttgctttctatattcagctgcttattgacatctccacttgtaactccttcttggtaggtcctgtaaaacctgctctctggccaggcatggtggcacacacctataatcccagcactctgggaggttgaggcgggtagatcacttgagcccaggagtttgagaccagcctgggcaacatagcaagagctagtctctaaaaaaaaaaaaattataacaacaacaacaaaaacccagctctacctgtgatattccctgtcacagttgataactccactctagcaggtgcttgggtcaaaaattttgaaatcaccttgttatggtggctcacgcctataatcccagcagtttgggaggccgaggcgggcagatcacctgaggtcaggagttcgagaccagcctggccaacatggtaaaattagctgggcgtgatggcgtgtgcctgtaatcccagctactcaggaggctgaggcaggagaatcgcttgaacccaggaggcagaggttgcagtgagccgagattgcaccattgcactccagcctaggcaacaagagcgaaactccatcttaggaaaaaaaaaaaatgtagaatcatccacaactcctctatctctcctaccttacaaacagtccatcaagaattctagttacctcaacttcaaaacatatctagaatccagctatgcctcaccacccccattgccaccattttggtccaagctaccattatctgttgcctggcttggtagcagagtcctctctctgctttcttcccacaccttgtacaatgttgttactctccatacagcacagagactgaatttccaaaacaaaatttaattaaaagtcatttatttgcacaaaacccttcagtggtttccatctcaataagagtaaaaagcacactttacaacagcctaaatggccttacaggatctgacccctcttatctcttcaacctcctcttggttttcgctcctcctcattcaccgtgttctagcttcattggacgctagctgtgccttcaacaccttcagcttccaccttgggtcttagcctttattccgtctgcctggtatgctcttttcccgaaactccatatggcttttgccctctccttcatgtttttgctcaaatgtcactttgtctgtgagctctactccttttacccttttgaaaatcacaaaatgcttctcatatcactccttatactttgtccttttaacaatgccttttttattgttttattgttctaggtcaggagtgataagacatttgtactttacttatttattatatttttttgtcttatctccttcactagtatataagctccacaaaacaggcatttttacctattaataagtaatgctgtcactgtctagaagaaagccaggtaccagctatgcattcagtaaatgctttttgagtaagtgaattcacttgaacctgacaacacaagagaacatttttcatctgttccaaagtgttccttaacattatgaaagttctttgtgcctgtcaggccctcaatcaataggcaagagatccaggctctgtcactgtgagtcaaaccatattgtaaaacctgtattcctaggtgccgtgccaccaactctgccttttctctcactgaccacgtgaaccgtgtgatctggatgacaatgttgtttctaggaatttgattttgctttgcttattatctccaggaatatttgtttgggttttaggttaggcttaggatgtggtagaatttccttccacgtctcttctgtctggagcctctgtcctccttagatttaaggattatcgaagattttctttgaaatagtctgtagtagactttgatatttcatttaactcactaacaaaagatccagccataaatacaatgtccttctttgtgtatatgtgtgtcctgttgctgtaatagtccccattacttgagcttcttttggcccaccatgtatgtatacccttctctcccagcagaaatcttcctgtggtattttgttggactttagtacactctgattttatactgaatactaaatattcaactttattatgagttaatttggtttatttttgtttttctttagaactaaaggtggtccacaaattgcttatgaacgcggctttaggtggaagcttgctcacttccgttatttgtgccaggtactatagtggtaaataaatcttatactcaataatttagtcttctctttatacaatacatatactataactcagatgatattatgatattatttttgtttttagtctaatgcactacctagtcatgtaaagatcaatgtgtcccggcagacattgtttgaagattccttccaacaggtaaggaggattttagcagaataaaacaccatttgtctcattgtattctgtgcatctaaagaaagtcagggttttagagatttttaaaccacccagaacacagctataataataatgactgccaccgccacttgttgagtgcctttgttttgttttgttttgttctgttttcttaaatagagatggaatttcgccatgttgcccaggttggtctcaacctctgggctcgaacgatctacccacctcggcctcgtaaaatgctgggattacaggcttgagccactgcatctggcctgagtgcccattttaatyatagttacactaaaccttcccatatactgagtgattatcatttgcaaaacaccggcatcttacatttctcattttatttcattcgtcctcacagcatccctttgagatagcacttattgtatctccatgttataggtaaaggtactgagactgagagacatatcatgaatttagatgtgtatttactaaaataaagcttaaacagcttttggaacaagttgattcttgttttgacacaatacttggctaagaatttattacctcaaagttttgataatgctatcaaattaaaattaaattggtagatactgtattccatttgagaattcctttaataactttattttcacctttatgtttctgtttaaatgtgatctcagagagaccttctctgagcctactrttttaagatggcagtccttctcttctccctcacagtcacattccagccatttatggtgctttattctttttcataaccacccaacatagtgtattttgtcttccttactagaatgtgagctccatgagagcagggactattggtttactgctgttctgcctagtacgtagaatagtgcctttgcacatagagggtattcaataaatatttgatgaacaaataaatgaatgcagtatytcttcctttcatgagtcatctgcagaatatttaaggataaataatccaaatactgtattgtcagtttttgcccaatgaagtggagaatttttcataatgagacgtcttattccccccctagtattataatgatgaaccaaattatgctgtgtactcaggcatacagggacttttatttatactttgtacaagccaaaatggagtaatgatactctgagccccaagagaatttcaaaccatagcttaattttacgattggactttgggcatgatacttaarctattatcaagttgattttttttttttgagttaataaattcttagcaaactaagtgtaaataggtcaactttttctaaactctggattgattttagtaaatgtacatctgaattcatggtagactttattttgctttttaccctgtcttgggaagaatcatggtctatttgatgtatagcactgagcccacgactgcctcyaaggaggcatgctggtgagctgtgctccaacccagacttgccagtcttggctctggtcctgacatatgtgtggaatgtaatttatttctatccaaagtaaagcctacttactagtaaccttgatgtaagctattaaagattatgaaaatttggtatacgtattgtttttaagttatactagcctgtgaataaattcatcattgtataaataattgctcattatagctgagttcctttcctactgagaaatggaatgtgtggtataaacaggatgcagaacaaagtcttttgcctctaagtactgctagtcagaaaaatttacctgttggaagattttggtacagtttggggaaaccagtaggggagataatatttttaaccttaaaagccttttgtgtcaaactcttcctgtcttgtcattaacccaaaatagaactatccatttaatactagaaggaggaaagagtatagttgacccttaaacaacacaggggctaggggtgctgaccccttgcacagttgaaaagccatgtataacttttgactaccccaaaactgaattactaatacctaccattgactggaagccttaccaataacgtaaagagtcagttaacacatagagtcagttaacacatattttgtataatatatgtattatatactgtattcttttttttgagacagagtctcgctctgtcgcccaggctggagtgcagtggcacgatctcggctcactgcaagctccacctcccgggttcacaccattctcctgccttagcctcccgaatagctgggactacaggcgcccaccaccacgcctggctaactttttgtattttttagtagagacggggtttcaccatgttagccaggatggtctcaatctcctgacctcgtgatccacctgccttggccttccaaagtgctgggattacaggcctgaggcaccacacccggcctgtatactgtattcttataataaagtaagctagagaaaagaaaatttttttagaaaatcataaggaagataaaatacatatactgttcattaagtaaaagtggatcatcataaaggtcctcattctcattgtcttcacattgaataggctgaggaggaggaagagggcttggccttgttgtctcaggggtggcagaggctgaagaaaattcaagtataagtggacctgtgcattcaccatgttgacttaaactcatcttgtttacgggtcaactatatgtgaaagtgagtcaggaaaagcttaacagattgatatgtatgtcttcatctagtttgtgaaagaaaccaattcatctcttgagttaaaagcattgtataagataaggaaatgtgttattttgaaaatagagattaaatttaaattgttttgaaaggaacttgtactgcatgtgagtatttaatattcatgtttttgtttttaattagattatggcattaaaaccctatgacttgaggaggcgcttatatgtaatatttagaggagaagaaggacttgattatggtggcctagcgaggtaaaataaaaaacacatatctgccttgaaataagtatatctcattgtatacagggaaagtattcttcaaaacatatgtgaatatattgtattaaatttttgaattaacaatccagaatttttctcaaaaatacacacggtaaccattattattattactactcttggttatctttctatacatctttacatatatgtaaatttgtatatatgtgtaatatagtatatatttgctgctttttttaacaattaatcatacaatgtacaaaatgtaggatctgatttnnnnnnnnnnnnnnnnnnnnnnnnnnnnnnnnatatcaggagatcgagaccatcctggctaacacggtgaaaccccgtctctactaaaaataaaaaaaattagccaggcgtggtggtgggcgcctgtagttccagctactcgggagggtaaggcaggagaatggtgtgaacccaggaggcggagcttgcagtgagctgagatcatgccactgcactccagccttggggtaggagcaagacgctgtgtcaaaaaaaaaaaaaagtttttaaagctttttgtagaaatgagggtctcacagttttgcccaggctgatcttgaactcctgagctcaagagattcccccaaccttggtctcccaaagtactgagattacaggtgtgaggcacagcactcagtctgaatattttcttttttaaaatggctgtacaatattctgttgtatggaaatatcataattaatagattagcatgcatacattcttattttttgctattgtaagtaacatcatattttggttttatgtttatgtttttagtccaatctgagtctcttttgggaataaagttttctacattcactaaatatattgttaacagtagatacttgtgaagcaatatgggtggaaaatccttttatttttcaattttgtcccttatttgttctgccccagcctaatttggcaacaatttattgtttagcaaaacattttgattaaatctttctaaagaattcaaacttgcttttcatagaaacaactccttttttgaactcatttcagaggtgtacagaattacaaaatcacagttttaacacaactggcaaaaagagatacagaaccaagtacaactgatggggatagataagtaataatatatgtggaattatcagagttttgtttatattagcatatttcctcatttacaacatcattaaacttttccagaaacgaaacactgcctatcataataaatgttcatattgcatctattacgagtttatctcaatttcagaaatgttcagacataagaaaggtacatcttagaaatgaggaaatatggtatttttacagtgtgtctttattaacatttacattcttatctgagcccttatttgcctcaactatttgggtctaagttttatattttgatagttttaatgaatatagctagttcctccataacatgattttttattcctaaattttttatttaattcatgtattggtgggctagattcatcaaatggtttattaaagagtttacaggattgatatattcctacagtctttgcataatgttctctgttgcttttacatataaacaacaatttcactagatataaatttctcgcacacttgtttttccaatactcagacattgctttactgttttctagcattgaatgttagtactgtgaagtgtgaggccagccccttgtaggaaccttatttttcctctgggtgcccacacagtcctttttcctgaagttcaataatttcactgttgattgttttgtatctttttttaggaatatattaagatcttccttaatgtcagggaagttttcttctattatgtctttgaatattttttctgttccatttgttccatttttcttcaggaacatcagtcatgggtatgtggaatctcctttgtcagtcttacatgtctgtcatcttttctctgatcatttttatctttgcrcttttccattttattttgatttttctcaagcctatcctcatgtcactgtttgcagtactgccctacgttttgctgcttctaatgtgatttttcttcattagtggttttactgttttcttcattttcttctttaggctctgctagctcatctgttgtctcataattttttcaacctcttgtgtctcttcagtttatttgagagtattgagaagaatatgttgaaagttaattcttctgcctcttgctagttaggaatttttcttccttttctgctagcatcagaggaaaagagtagatgccatgttttagccattcttcttttgaattgatkgagttttctctgggctkttgtttgctaaaaattatctgaagcatctggagggtttattcctagttttatatatgtgtctaaacacactctcacaagacctgctccatcctcttacctggggtatgtcttacttcagcctcatcatagagggaagtcacttggttcaactactactatgttacaactggacttagttttaataattggtgtttactatttctagttgattttgttgaggactyccttctctacccttcaggcagtatcagtgattgtgttttataacctttagaaaaacgtttattaacaggctgccaggccagatgtagcctacatagaggtggccctcattgtgattttacagtttttaaattacttgatgacatttgaaaatcattagattatgcttaagaatgaagatttctgacttctctttaaaacactcgacctgcaatcctgccttctcatgtggcgtcagtgggctgaatcagagttgttgtttcccctgtagattagcatatactctgtttcactatggtgtccaccactgcccagttgtctgaggactacgataatatgcctagaaattcttcttccttaaaaccaataattcagcaggtatataaggaatggaggattgtgnnnnnnnnnnnnnnnnnnnnnnnnnnnnnnnnnnnnnnnnnnnnnnnnnnnnnnnnnnnnnnnnnnnnnnnnnnnnnnnnnnnnnnnnnnnnnnnnnnnnnnnnnnnnnnnnnnnnnnnnnnnnnnnnnnnnnnnnnnnnnnnnnnnnnnnnnnnnnnnnnnnnnnnnnnnnnnnnnnnnnnnnnnnnnnnnnnnnnnnnnnnnnnnnnnnnnnnnnnnnnnnnnnnnnnnnnnnnnnnnnnnnnnnnnnnnnnnnnnnnnnnnnnnnnnnnnnnnnnnnnnnnnnnnnnnnnnnnnnnnnnnnnnnnnnnnnnnnnnnnnnnnnnnagaaacttacagtctgatggatggggcaagtcatgtgcataaaaatgaattaatattgtgaggttgttacaacagagtattcagtgactgatattaatacaaatacactggaaattgcctcaaaaaattgttgaaatgggatttaagctgaattgaagttgaggagacatacccaagcaaaagtgtggcatacaaataagcatgttatatctatatgaggatcagtgaatttgtagtttggccacatcgaaactagcaggtaacttaaatggagagccagatcatagaagaacttggatagagggccaaagaattgggcagtggagttcttaaagactgttgagcagaggtatgatgtatatatgaatatatttaagatctgtttttaaattcacatattaatgctaaaaaataaccttgacttattttcttatagagaatggtttttcttgctttcacatgaagttttgaacccaatgtattgcttatttgagtatgcgggcaagaacaactattgtctgcagataaatccagcatcaaccattaatccagaccatctttcatacttctgtttcattggtcgttttattgccatggtgagttcctgactttattattatttatttaagtttgttacaaatgtattagagaaggcttttaaaaaaaaaaaaaggataagcattatatttgctattcacaagttttgttaccaagaaagtttccctggagagtgtaaaaatatattttttgagtacctgtataaaatcaagattatgaatatgaagattatgtttatacagccacttagtctttaaaagtcctttcatttttaaatttaaaacccatttatagtatgactacttttatttgtttatttatttttaatagaaaaaattttaattcttttgagaaaggatcacagtctgttgcccaggctggagtgcagtggtgtgatctcagctaactgcaacctccaccttgcagactcaaacgatcctcccacctcagcctcccaagtagctgagactacaggctcgcaccaccatgccagctaatttttttgtatttttagttgagatggggtttcatcatgttgcccaggctggtctcaaactcctgagctgaagtgatccgcctgtctcggcctcccaaagtgctcagattacaaatgtgagccaccactcccagcctacttttcaataaaaggaaaatctgagctatctaataattgtatttgattgtttttggaattttaagcgctttgcagaagcccttatggaactattgtcttttgggaagtgtttgtatttatttatttacgtatttatttacactttattatctattaattcattcagcaaaaatttattgacagcctactgtaatgccaagcactgttttaggctccagagatgaaaagaatacacagtccctgctctcagggacctaaattccattagatagaaatgagtaatcaatagatatattctgaaggaaagagtgtgttgctttttttatatggtatggttagaggaaacctcactgatggatgacacatgaacagaaattgaagaaagctagggactgaatcatgcagatatcttggagactattctaggcatagggaacagcaagacaaaggctctaatgtgggagtgcattcttgattgagaaagagaccagtataattgcagcagaggatatgagagagaatgtaataggagatgagattgagagatgctgtgtgggacctttaggaaattcacataagagttgagtagggcaatgagtgacctgatctaactaacatgatctgacttaaattttattaagcttgctttacgagtatgtagaagacagactataattgggggcataggaaaacatggatagaagcaggaaaatcatttgtaacaatccaggtgaaagataatagtggcttggacttgtgtcttctagcagtggaggaagtgagaagtgatttggattctgggtatattgcgaagttagaactaacagttttctgacagattagatgcaggggtgtgagagagagtcaagtatggcaacaatatttatggccagcttgtctggttgcaaattttgggtatgggagaaatccagaatatttaggtttggcttgttaagtttgaagtagacatccacatggagatgtaaaagagatagttggaggtataagtctggcaatgaaaggatatttagtttggagataggcatttgggaattcttggcacatagagagtattaaaaggcaatatgattgtttatagagtgagtatggatgaagaagttgttcaaggacaattatagtcagggagataagtaaccaacaaaagatctgaggtagtagaatcaaataggagtggtccccagaggacaagggaagaagaaagtgtgtttcaagaaggaagacatggtcaaccgtcatatgttactgatagactgagcaagatgaagcctgggatttgaccattgtatctgcaaaggtgaaagttattcatgagtggtagggtggaaagactgatgggagtaaaatcaagagagaatggagggagagtggatacagcaaatataaacaaggaatcatagagaattggtcactaactggaaatgcttatggagtcaagaatgggaggagaataaaacatttgtattgctgatagtgatgactaagtatcttagtctgttttgtgttgctgtaagggaataccagaggctggataatttataaagaaaaggggtttgtttgactgtgcaggctgtacaagaagcatggtgccagcatcgtcttctggtgagggcctcaggctgcttccactcatggcacaaggggaagcagcgtgtatgaaagtcacatgatgagagaggaagcaagggtggggaggaagtgccatactctttttaaaaccagctctgtagggaactaatagagtgagaactcaccagggcattagtctattagttgcaggtcaaaattctttgtttttctggtttaattttagaatcaggggtacatgtgcaggtttgttaaaaaagtatattgtgtgatgctgagatttggggtatgattgaacccatcatgctcaggtagtgaacgtagtacccaataggtagtttttcaacccttgccttcctccctctctccctcccatagtagtccccaggtgtctatttttcccatctatttatgtccatgtgtgcccaatgctgagctcccacctgtacgtaagaacatgcagtatttggtagttggcttgggaaaatggcctccatctgcatctgtgttgttgcaaaggatatgatttcattctttttttggctgaatagtatttcatggtgcttacagtccaccattgatgggcacctggatttattctaggtctttcctattgtgagtagygctgtggggaacatacastgcttgtgtcctttggtagcacaatttattttcctctggatatctatacccagtaatgggattgctgattctcatggkggttcaactcttagttcattgagaaatttccaacctgcttttcaaagtggctgaactaatttacattctgaacaaagtatatgtctcttttttttctgaagccttgccaacatctgttattttttaatgttttaacaaaagccattctgactggtatgagatggtgtttcattgtggttttgatttgtatttctctgatgattagtgawgttgagcattttttcatatattttgttggctgcttatatgtcttttcttttcttttcttttcttttctttttttttttttttttttgagacaagagtcttgctctgtcacccaggctggagtgcagtggcatgatctcagctcactgcaacctctgcctcctgggttcaagcaattctcttgcctcaacctcctgagtagctgggaccacaggcacgcaccaccacactcagctaatttttgtatttttaatagagatggggtttcaccatgttggccgggctggtctcgaactcctaacctcaggtgatccgccaacctcggcctccccaagtgctgggattacaggcgtgagccacygcgcccagcagctgcttatgtatcttcttttgagaagtgtctgtttatgcttgcccagtttttaatgggtttttttttcttgttgatttgcttacattccttatgaattctagatattagacctttgttggatccatagtttgtgaatattttctcccattctgtaggttagtttactccctctcttgctgtgcagaagctctttagtttaattaggtcctatttatcaatttttgtttttgttgcaattcttttgaggacttagccagaaatttttttgtcaaggctaatatcaagagggcatttcctaggttttcttctaggattttaatagttttaggtcttacatttaagtatttaatccatcttgagttaatttttgtgtatgatgaaaggtagcactctagtttcattcttctgtatgaagaagccagctgggggatcacatttcaacatgagatttggtggagacaaacatctaaactatagtaccaagttagaggataaagaatttgataaagtcagaatataaggaatatgagagcaatgggcttgagttggagagaggaggagatttatttagcacrcacaccaagtgatggaaagattatctataataagattatatggattcagatgctagtagtgagcagatatagtagaacacaaaagttttcttctggttgcttctgtttcctctgtgaaataggaagtaagatcatcaactcagaataaggagtggggagaagtatttgaggaaagaagagtaggaatgaaatagtcatctaggaaagtgggagagtgaatgcagtagggaaatgtgattaccaggaaacagaccagtgatgaaatacaactgtcggtcatagagcagtcagcttggttgtttatgcatttctagcatgttccattgcctaggtacaggcattgagtaacctgagagttgaatttagttaggcttgggattttgctagaaatacactggcagaggtggagtttgaagggagttattttattttattttttgagacaaagtctcgctctgtcacccaggctggagtgcagtggcacgatcttggctcactgcagcctccacctcccaggttcaagcaattctcctgcctcatcttcctgaatagctgggactacaggcgcgtgccaccatgcccagctaattttttgtatttttagtaaggacggggtttcactgtgttagccaggatggtcttgatcttctaacctcatgatccacccgcctcagcctcccaaagtgctgggattacaagtgtgagccactgcgccccaccttgaaggtagttattttaatgattgactatggaatctaaactgagtaagggaagacataacttcatgagggggctaaggtagtattaatagcttcagtggatttttttagttccccaaaattggtgggagtctggggcttctgtgttggctgttgtgaataggagcgaaggcacgatggggttagtcctaaaagcctcacaggcagcagtgagagtaagaaacgaacgagagagctgccttttcaggtgcacagggcccttttatatttccttatccagttaggttaattcaatttataaaacatttaggaagattgaggcagggtatggtaatagaagtcttttatcatcctatacagtttttgatatatgttatatagctatgtgttataaaatagattgttttaactttgtttttcatacctagcattttatataatattttagttttcatgatttatgccattcacttactgaatgctttgtttacttgtgaagtctcatgatttttcttttatcattgttctctaagaaattgttattttgcaaattttaaataaaattttwcatttttctttgcaggcactatttcatggaaagtttatcgatactggtttctctttaccattctacaagcgtatgttaagtaaaaaacttactattaaggatttggaatctattgatactgaattttataactcccttatctggataaggtttgaagattttgttttgcaataagtcatttttttgaaacccattttgtttcattttgttaattagtgtatatatatttatttcacccagagataacaacattgaagaatgtggcttagaaatgtacttttctgttgacatggagattttgggaaaagttacttcacatgacctgaagttgggaggttccaatattctggtgactgaggagaacaaagatgaatatattgggtaaggtgatataccttattaagcttaatttctagaacacttcagaactaaatcctctctctgtacccttaatttcatccccttttcatgcctttgggaagttcttctcaccagtaccaatgttcttgaaaaaagagaatatatgttgcttcattttcccactgccatttgctgtaaccattctaccatttccctttccatgtcattttcccttttttaacttaggcttttaaatagtgctcaccacagcctgtttcttgaaactcagtgttttcttgaattccatgatcctatgtcatactgattttctttacattctcttgttttaaatttttgtttttagagagagtttcactctgtcgctcaggccgtcgtagtggcgtgatcatagcttactgcagggttgacctcctgtgctcaagcaattctgccttagtctcctgagtagctgggactacaggcttatactaccattcccagctaatttaaaacaatttttttttttttgtaaagatagggtctcactgtattgcccaggctggtctcaaactcttggcctcaagtcatcctcctttcctcagcctcccaaaatgctgggataacagggtgtcaccatcctggtcacttgctcttttttaatggcagttctttaaatctcctatttcctaaatgtaggcatttttccaagattttatttcaacctgcttctctaaatattctgctaacatagcttcaattttctgttaaagttatatctgaactttagaaataatttccatttgccagccaggtaagtccaaacattttcaggaaagaaccaggcagtaaactttttaggcttacaggcacatttcttattgcaactactcacctctgtggtatagtgcaaaggtagctatagacagtgtataaatagatgtgtggctgtgttccagtaaaacacttgtagacactgaaatttgattttgtataattttcatgtcccaaaatacttttaatatttttcaatcatttttttaaaatgtaaaaactattcttagctcaaatgctggacaaaaaaaccagatgattaggcccatgggccgtaatttgccagcacgtgaactacagatgacgcatcttaaaatgtaatgggcctaaaatcaaacttttcatttttcctagatattgcctcctactgatgtcttctatgaatagtactaccattttcaccctcttagatgctagctgtcatctctgtctctttcagattttttgttttttatatttgttttgaaaatgggattggattatacacattactccgtagcttacttttttttgtcttaaggacagtacagttaaatctaactcattttttaatagctaggtacattgtggtgtatttttttctatattcttcagctattcctgtcaatagagatcatttaggttgtgtccagtttgggccactgcaaacaagacagcagaaaacttccttaagcatgaatccatacatcctgctacttgttttgtgggctagatttttaaaaagtgaagttactgggtcaaaaagtatttaatagatactgctatgtggcttttgtaaaatgtcacagcccttcttttttcccttcttgtaaattgctatggcctttcaaatttacccccttagtgtctctgcttaccaactttaatgtacccttcttagcttggcattcttggcctcttcttatttttctgctaaaccagtcatctctgagtgagagaagttaccaataactgattttcttcctttatacttttgtactctgttaggtatttttgttttgctttrttctacagtgtgcatttattacgctagttggaaaaaaacagtaacactatattttgaggaaaatatattcatcaaaagatcatgcataaggcactggactttctatatttgttaagcctgagccttccacaaagtccaacaaaaataagtaccacaatctaagtggttaaaaaaaatgctatcagtggtttcaaatatcaaaaacagtctaaataaaatttcactatgtaagatgtatattcactttctgtaaagttaagcactgtttcaaacattttatcactgtaatactattgatagctaatcatgaatgcagcaatttttggaggattttgtttcagtctcaaataataacagactttagtcttgttttttaatcttgctcttgaaaattatatgataacactcttgtttagttgtgataccttatttttagtgcacaaaataggccatcagtgaatctataagtaaatgaatggtggaaatatatatgaagtactactggaatccaaagtgggaagagagctattgtttctgctgggaggagtcaggaaagttcttcataggacattatgtattagactatgtcttaaaagatgcatgagaggctggtggctcctgcctgtaatcccaggactttgggaggccgaggtgggtggatcacttgagcccaggagttcaagaccagcctgagaaacatggcaaaacctcatctctacaaaaataaataaataaataaataaaatttttttaaaaaattagctgggcatggtggtgtgcacttgtagtcccagccactatggagactgaggtgggaagatcacctaagcccagggaggtcaaggctgcagtgaaccaggcaaccgagtgagaccctatgttattaaaaaaaaaaaaaaaaaaaaaaaaagatacatgaaagcttgcccgatagagggagattttggtacagggaaaacagcaagagcagaattgacgtattaaggggataagttgatggtgagaattagtggctatagtggagcctacagtgatagctaggtttaaaattaccttggtttacaatttggttgaatagaaggtgagaaaatgaaaacactgagtaaggtgtactcttataatgagtgtggtggtaaagggaggacagagtaatttaaaagagacactgggttaaaggaagggtttttggaaaagaatagtctgaacacctttgtggacaaatgggaagaaaagttggagttggagttgaggatacgggacaaagagggtttagtaattgaagaaaagttttggaggcagccttagaaaagcataaggccagcttcctctagaaagcaaaaagaagagttagaaatgggaggagtgtgaacagcttggctttctcttcatcgtctagaatctgtggcttctctgtatgaggtggtgtatgctgcttctttaggtagttcttttcagatccatctccttttggaatctccttttacagattttgtgtcactgacagattttcttccttatttcctttctgtcatacttccctgctcttacagctgctttatatatgtctcttcagaatgttttgttttcatcttaattgagttcttctattctagttaggaaatcttcgtgttttccaataaaacagcaggtaaagaacctgttctccagccttaagccctctcagaccataaacctacaccagcacatggcctgtgaacatatggtcattacatactgagacaatcccttgccttgctggtgtggaaggctttgagtcagagtcctcaggtctgtcacggcaatgcttggtgtaagaagagcctgttaaatgactagctgttccttcccggtgggcacatgatatttggatttatttgtctagatataaacaggaaataattagtgctaggatttggctatcttactaaatagtgaagaacctcctatttattttctttcttttttctgtgttttcctttcctatttattttaaaagcatcctttttaatagttaacaatgtgttagaactgatttcctcaaatgtgttaactctaaaattatatgtattcatacatatacacacacatcacatttatatgtttatatatatggcatatttagaaaaagagaaagaactatagaagttcttggtgtttttaagtattttacttcacatataaattacctatttttaaataccatctttattttcagtttaatgacagaatggcgtttttctcgaggagtacaagaacagaccaaagctttccttgatggttttaatgaagttgttcctcttcagtggctacagtacttcgatgaaaaagaattagaggttaggcccttttattatgctattgtagggaatgttagtggggggagggactaatttagtgcttttacagaacagtgttcacacattttaaaatcctgtagcacaatcttgaatcctctcatttgtcctgatgtcaaggtggtatttattctagcattgggtaagagtcttaattatgttctctgaaccatataattccatgagcacaaaatcatcaatcagtgtcacttgttaggggtcttgaagagttgttggaacattattaataattctgaaatttcagtttagtagtgagttgcttcaaagatcagaattttaagtcatgagttcttagtggtcttaactgtatttagacttgttagaagtatatcaggcatgtgataaaatatatcttaaaatataccatcttaactatttttaagtgttcaataatgttaaatatattcacattgtgcatccaacctccagaaatttttcatcctgcaaaactgaaactctatgtccattagacaagtcccccttttccccagcccctggcaactacccttctactttgtttctgtgagtttgactactgttgatacctcctatgagtgaaatcatacagtattttactttctgtgactgggttatttcactcagcctaatatcctcaaggttcattcgtcctgtagcatgtgtcagaatttcttccttttttagactgaataatactccattatagagtattatgtacactaccacatggtattatccatttgtcccttgagggacctttgtgtggcttccatcttttggctgttgtgaatagtgctgctgtgaacacaggtgtacacatatttctttgagatcccgtttcttttggatatgtaccaggagtggtattgttggatcatatggtaatcctctatttaattttttgaggaactaccatactgttttctatatcagttgcatcattttacattcctattaaacatgtagaaagattccagtttctccacatctttcccaacatttattttctgtttcttgttttggttttttgcttgtttttttaatagtatccaccctaatgggtgtgaggggatatctcattgtggttttgatttgcatttccctaatgattagttatcaagaattttctaaagcttattttcccatataagttaggacataggctgggcatttgaatagtccttggcatttcctctctgcctgctttgggtgtgctattttaactgcagccatcttgggccttttattaagaaacttggttctttcatgtaatcaaatgtgcatatgaaaaacagcacttcagatttcatacagtaatattcctatgtaggatttagccttctggcaagtctgactaacctaggaagtacagtcatctctcggtatctgtgggagattggttctgyagggcacctgtggacaccacaatccatggacactcaagtccttacaattacattatataataggatagtatttgcatataacctacacacttctcccttacactttaaatcatctctagattacttataaatacctaatgcaatgcaaatgctatggtaaatagttgttatactatatttttaatttttttattttttttaattgtcatattattctttttctcaaatattttcaatctaccattggttgaatctgctgatacgaaagctgttggatatggaaagccgatatatatgaaaaccaggactctgaacctgactgacatagactgtcactaatcctggttaccatcttccttaacagtttgcttacacaaattaacagaaacatattagaagattagcatggaagacatttttagagtagtatttattaatctttttaaaaaccatcgacttcatttttaatctgaagatggacatcttgcatcctctaaattcatacacctaaatattccatacctccaattaagaatgcccatgttagaggtgcactcagagagggatgttatagtgggagccctatattgaagtggagatgaaactaaaacgggagatcaagaagcataagaataggaacatacagtttatgtacccttggcagggtttataatgttctcacatactgccctgtatgtgggaaggccatatgatacctttcttttacatataagatgactgaagcccttaatgattatttgccttgagctaatcagttaagagtacagttaagagtgctaatcaattaagagtgcagagctgtgtgagaaaatacagattttgtcttgttttgctttgtcttgagttttacacctaatctgttgttctttcttctactgtcattcattgcctctcttaccatagtaatggttatttatactattattcacaataatggctatgcatagtcacaccgcccttttataggttaacatctgtttaatgcttaagaagatacagtagtcattctttatgaaaactcttaccacactaggaatataaggcaactttcttagtttgataaagggaatcatcatcaacaacaaaaaacctcagcattattctaaatggtaatattttgaaagtttcccattgagtttgggaaaaaggcaaagatgtctactcttaccacttctattcaatattttaccaaataccctagccagtggcaaaagcagaaataagaagtataaagatgggaaataagtaaaactgcctatattcacagatgaaaacatgattttcagcttagattagaaaatcctaggtaacccaccaaaaaactactagaaataatagtgaatttaataaggcatgggtacaatgttaatwctttaaaaatcaatcgtatttttatgtattagcaacagacacttaaaatttagattttggtttcatttgtgaaagcatcaaaaaatgagcaaatttaaccaaaaacacacaagacctctatactaaaaactgaaaacattgctcagaaaaattaaggaagacctaaataaatgaagagatatacgatgttatattgttaaagtgtcagttctctccaaattgatgtagagattgaacatctcagcagaattttttttatagaaagtgacaggctgatttcaaaattagaaggaaatacagaggccctagaagagcaaagccaattttgagaaaggacagacttggaggatttgcatcacctgattttaagatttctaacaccatagtaaataagatagcgtggtatttgtgaaagaatagacaaattggtggaacactagaatgtccagaagtagatccacacctacattgtcaattgattttcaacaaaagtactaagatatttcaacgtggaaagggaatatcttttcaayaaatgatgttgaatcaactagatatccatatggaagaaaattaactataagcctacctcagtccatatttaaaattaactttgaccttacctctgcccatataattattcatgcttacaattaaaaagaattataagcctgaatgtgaaagtgaaaaacataagagaaatcttgatgtaggcagaagttttttagaacacaaaaagcaataaccatgaaagaaaaatatggatacattggacttcttcaaaactaaaaactgctcttcaaaagataccattaagtgaaaaagcaacctacaccctgggagaaactattgagacaaagatcttatatctggaatatattaacaaaaaaactcacgtaactcaataaaaagataagaaaacatttttaaatggacaaaggcttacttcccaataggatatacacagatggcaagtaaatacttgaaaaatgcttattagtaattggggaaatgcaaatcaaagcaccactttgagatagtgttggtagtttcttgtaatgttaaatgtacatctaccttatggcctaccagttctactgttaggtgtttatcaaaatgaaatgaaatatatatccacacaaagactcatacatacatgttaatcattttattcatcaatgctaaaaattgaaagtaacctaaatgttcattaacaagtgaatggataagcaaattgttgtatattcatataatggaatactattcagtgatagaaaatatgaactactggttccaacaacagcatggatgaatctcaaaaacatgttgagtgggaaaaacaaaagaggatgtgtgtatatgtgtatacactatatatcataaaaatatgtatgtatgcatatatatgacattcttaaaaggacaaatataatctgtggtgaaatcattgatcacctaaaactagagatgaggatgattgttttgattacaaaaaggggatgatgattttgattacaaaaagggatatgatggaaatattctatatcttgattgtaatggtggttacacaggtgtatacatctgttgaaaatcttcgaactatatacctaagtttgtgcattttattgtatgtaaattatacctcaaagttgacttacgaaaaaaactaagagattaagtattacatattttactatacctaaaataatgttcatttcatacataagttgaggttgtttgacaatttcacatagtagaatattcctagagaatattattctggataaattattaataggaggttagtatatttttttattttcaaatayataagatagcatagatttttaaaaatgagaaccagaaataggtttggaactaatgaatttggatagccagtttgggggagatctatctgtctgtctgtctgtctatctatctatctatctatctatctagatataaatctatatatatagatgtgtatgtgtgtatttacacacacacaccataccatatatacataatgtgtgtatacataatagatacacacacacatctagatataaatctatatatatagatgtgtgnnnnnnnnnnnnnnnnnnnnnnnnnnnnnnnnnnnnnnnnnnnnnnnnnnnnnnnnnnnnnnnnnnnnnnnnnnnnnnnnnnnnnnnnnnnnnnnnnnnnnnnnnnnnnnnnnnnnnnnnnnnnnnnnnnnnnnnnnnnnnnnnnnnnnnnnnnnnnnnnnnnnnnnnnnnnnnnnnnnnnnnnnnnnnnnnnnnnnnnnnnnnnnnnnnnnnnnnnnnnnnnnnnnnnnnnnnnnnnnnnnnnnnnnnnnnnnnnnnnnnnnnnnnnnnnnnnnnnnnnnnnnnnnnnnnnnnnnnnnnnnnnnnnnnnnnnnnnnnnnnnnnnnnnnnnnnnnnnnnnnnnnnnnnnnnnnnnnnnnnnnnnnnnnnnnnnnnnnnnnnnnnnnnnnnnnnnnnnnnnnnnnnnnnnnnnnnnnnnnnnnnnnnnnnnnnnnnnnnnnnnnnnnnnnnnnnnnnnnnnnnnnnnnnnnnnnnnnnnnnnnnnnnnnnnnnnnnnnnnnnnnnnnnnnnnnnnnnnnnnnnnnnnnnnnnnnnnnnnnnnnnnnnnnnnnnnnnnnnnnnnnnnnnnnnnnnnnnnnnnnnnnnnnnnnnnnnnnnnnnnnnnnnnnnnnnnnnnnnnnnnnnnnnnnnnnnnnnnnnnnnnnnnnnnnnnnnnnnnnnnnnnnnnnnnnnnnnnnnnnnnnnnnnnnnnnnnnnnnnnnnnnnnnnnnnnnnnnnnnnnnnnnnnnnnnnnnnnnnnnnnnnnnnnnnnnnnnnnnnnnnnnnnnnnnnnnnnnnnnnnnnnnnnnnnnnnnnnnnnnnnnnnnnnnnnnnnnnnnnnnnnnnnnnnnnnnnnnnnnnnnnnnnnnnnnnnnnnnnnnnnnnnnnnnnnnnnnnnnnnnnnnnnnnnnnnnnnnnnnnnnnnnnnnnnnnnnnnnnnnnnnnnnnnnnnnnnnnnnnnnnnnnnnnnnnnnnnnnnnnnnnnnnnnnnnnnnnnnnnnnnnnnnnnnnnnnnnnnnnnnnnnnnnnnnnnnnnnnnnnnnnnnnnnnnnnnnnnnnnnnnnnnnnnnnnnnnnnnnnnnnnnnnnnnnnnnnnnnnnnnnnnnnnnnnnnnnnnnnnnnnnnnnnnnnnnnnnnnnnnnnnnnnnnnnnnnnnnnnnnnnnnnnnnnnnnnnnnnnnnnnnnnnnnnnnnnnnnnnnnnnnnnnnnnnnnnnnnnnnnnnnnnnnnnnnnnnnnnnnnnnnnnnnnnnnnnnnnnnnnnnnnnnnnnnnnnnnnnnnnnnnnnnnnnnnnnnnnnnnnnnnnnnnnnnnnnnnnnnnnnnnnnnnnnnnnnnnnnnnnnnnnnnnnnnnnnnnnnnnnnnnnnnnnnnnnnnnnnnnnnnnnnnnnnnnnnnnnnnnnnnnnnnnnnnnnnnnnnnnnnnnnnnnnnnnnnnnnnnnnnnnnnnnnnnnnnnnnnnnnnnnnnnnnnnnnnnnnnnnnnnnnnnnnnnnnnnnnnnnnnnnnnnnnnnnnnnnnnnnnnnnnnnnnnnnnnnnnnnnnnnnnnnnnnnnnnnnnnnnnnnnnnnnnnnnnnnnnnnnnnnnnnnnnnnnnnnnnnnnnnnnnnnnnnnnnnnnnnnnnnnnnnnnnnnnnnnnnnnnnnnnnnnnnnnnnnnnnnnnnnnnnnnnnnnnnnnnnnnnnnnnnnnnnnnnnnnnnnnnnnnnnnnnnnnnnnnnnnnnnnnnnnnnnnnnnnnnnnnnnnnnnnnnnnnnnnnnnnnnnnnnnnnnnnnnnnnnnnnnnnnnnnnnnnnnnnnnnnnnnnnnnnnnnnnnnnnnnnnnnnnnnnnnnnnnnnnnnnnnnnnnnnnnnnnnnnnnnnnnnnnnnnnnnnnnnnnnnnnnnnnnnnnnnnnnnnnnnnnnnnnnnnnnnnnnnnnnnnnnnnnnnnnnnnnnnnnnnnnnnnnnnnnnnnnnnnnnnnnnnnnnnnnnnnnnnnnnnnnnnnnnnnnnnnnnnnnnnnnnnnnnnnnnnnnnnnnnnnnnnnnnnnnnnnnnnnnnnnnnnnnnnnnnnnnnnnnnnnnnnnnnnnnnnnnnnnnnnnnnnnnnnnnnnnnnnnnnnnnnnnnnnnnnnnnnnnnnnnnnnnnnnnnnnnnnnnnnnnnnnnnnnnnnnnnnnnnnnnnnnnnnnnnnnnnnnnnnnnnnnnnnnnnnnnnnnnnnnnnnnnnnnnnnnnnnnnnnnnnnnnnnnnnnnnnnnnnnnnnnnnnnnnnnnnnnnnnnnnnnnnnnnnnnnnnnnnnnnnnnnnnnnnnnnnnnnnnnnnnnnnnnnnnnnnnnnnnnnnnnnnnnnnnnnnnnnnnnnnnnnnnnnnnnnnnnnnnnnnnnnnnnnnnnnnnnnnnnnnnnnnnnnnnnnnnnnnnnnnnnnnnnnnnnnnnnnnnnnnnnnnnnnnnnnnnnnnnnnnnnnnnnnnnnnnnnnnnnnnnnnnnnnnnnnnnnnnnnnnnnnnnnnnnnnnnnnnnnnnnnnnnnnnnnnnnnnnnnnnnnnnnnnnnnnnnnnnnnnnnnnnnnnnnnnnnnnnnnnnnnnnnnnnnnnnnnnnnnnnnnnnnnnnnnnnnnnnnnnnnnnnnnnnnnnnnnnnnnnnnnnnnnnnnnnnnnnnnnnnnnnnnnnnnnnnnnnnnnnnnnnnnnnnnnnnnnnnnnnnnnnnnnnnnnnnnnnnnnnnnnnnnnnnnnnnnnnnnnnnnnnnnnnnnnnnnnnnnnnnnnnnnnnnnnnnnnnnnnnnnnnnnnnnnnnnnnnnnnnnnnnnnnnnnnnnnnnnnnnnnnnnnnnnnnnnnnnnnnnnnnnnnnnnnnnnnnnnnnnnnnnnnnnnnnnnnnnnnnnnnnnnnnnnnnnnnnnnnnnnnnnnnnnnnnnnnnnnnnnnnnnnnnnnnnnnnnnnnnnnnnnnnnnnnnnnnnnnnnnnnnnnnnnnnnnnnnnnnnnnnnnnnnnnnnnnnnnnnnnnnnnnnnnnnnnnnnnnnnnnnnnnnnnnnnnnnnnnnnnnnnnnnnnnnnnnnnnnnnnnnnnnnnnnnnnnnnnnnnnnnnnnnnnnnnnnnnnnnnnnnnnnnnnnnnnnnnnnnnnnnnnnnnnnnnnnnnnnnnnnnnnnnnnnnnnnnnnnnnnnnnnnnnnnnnnnnnnnnnnnnnnnnnnnnnnnnnnnnnnnnnnnnnnnnnnnnnnnnnnnnnnnnnnnnnnagtcttgctctgtcgcccaggctggagtgcagtggcgtgatcttggctcactacaagctccacctcccgggttcacgccattctcctgcctcagcctctcgagtagctgggactacaggcgcccgacaccacgcccggctaattttttgtatttttagtagagacagggtttcaccatgttagccaggatgatctcgatctcctgacctcgtgatccgcctgcttcggcctcccaaaatgctgggattacaggcgtgagccaccacgcccaacctttagcacatcttttgaaccaattcagtgttatttaatttcttcaagtgtctactactttcatgattgaagatagtttagcatttcatattaaagtacatttaatttcattacagtttgtgaaagagacagacaatgaagtaagaatgcgactattgcagttcgtcactggaacctgccgtttacctctaggaggatttgctgagctcatgggtaaatgtaatttcactgtaatttctctgtacgtaattttgtgataataatggcctttggacatacaatagacttgattgaacctaaagattactcttctgtgctgtaggtagggcttcatttagaagaaagaaaaatgagtggctaatatcaaagcacttgtaagacaaaaatgaatgtgtcctcatatagctgaggtggccattgctttgctccctatggtgactgtgaagggagcgacattctgtagagagagttttcttcccaatgatctaattcttattgctggatctctgcaacaattttcttcttcaggcagaagcagcttacattgtgaatttctttattttgtatcattcatatgactgtgcaacatgttctattatttaagcagttgtcagaagaaaaaagtttaaaggaccagataaactttgtcttattttcttggtgtaggaagtaatgggcctcaaaagttttgcattgaaaaagttggcaaagacacttggttaccaagaagccatacatggtaagttcaggaatcctaaatacgaaggtgaaagccacagagaatcttttgttttgtttttttaaaaatatgtaagatccagtataactgcttattcattaaagtagtcagaatttcaattttgagaacagattaatacagcattctataactgaacactttagcatgttctcattaatagaaatatttgagaaatgcatccagtgattcaacaagtattagtgtacccactaggtataaagtaagatgtaagtattccctgttttttatgaagtttgtgccccatggtggggcacaaatgacaaacagataaacaaataactatttgcaaatcctgggaagtccttcgaagggaaaaatgagagtactctaacagagaacaactaacgggaacctactttgggttgggtggtcaaggagatttcttggaaggggtaatttgtttaaattgtgtttggtaaagagcatgatgtgggagtacgcagagaaagagcattctttgaacagaaatgctgaagtaaacaaagaccccgaagaaattgtttttcaaggaaatgaatatgataggtgtgattggaacttggtaaatcagaagaaagggagatgaaaaaattgggggatgtaggcagggactaaattatgtacagcgttataggctaattaaagaactgagatgtcaaagaaaaattagacagctttgaagagttttaaataacaagtaatgaatcccagaaaaatcggccagaaaacagtatagggaaggatttggatgcaagggtgaatgcagggagagtagttagaaaattgttatggttacccaggccaaagatgacatcctagagataggtgattctttcaagaggtcaaaactattttcatactaagccattatttgcctttttatcattttgaaatttctgcttgtggtgcaaaagcaatggtttgtgaacctgcttgtgccttagcacaaatcaaggcagtggcaccaaactgctacctctattcttcaacaccatacccttgaggtttaaagaaaaaaaaaaaaaagaaaaaggcaagttygttgaagttctttatgaagcagtaaaaattactaactttattaaatcttgatgcttgagtatatgtttttttaacatttgtgtgacaaaataggaagtctgaaatagcacttgtgcacaccagagaatgattttcttgaaggaaagcttttgggcagttgtttgagttgaaagctgaactagcttgctttcttttatggaacactatttttacttgaaagaatgacccaccaacagtttatgtagacttaggtatttgacagacattttcttgagaagtaatgatgttagcttgtcattttaaggaaaacaacaggcatttgttggtggtgataattaccaccatgagcttgacagcttcttaagactttcctcgatgagattagtggggttttttgtttgtttttttgtttttttgagatggagtctcactctgtcacccagtctggagtgcagtggcacaatcttggctcactgcaacctctgcctcccaggttcaagcgattctcctgcctcagcctctcgggtagctgggattataggcgcgcaccaccacgcccagctaattttgtatttttagtagagatggggtttcaccatgttggtcaggctggtctcaaactctcctcaccttgtgatctgcccgccttggcctcgcaaagtgctgggattacaggcgtgagcccgcatgggccggggaattagtcgaactcctaacccacatcacctttttctctacctacatccccacccccgcccacacttcccaacctgcggcgtcggtccccggtgccggccctcgcacccgggccccgggtagcccccaacgcgtagcggggggagaggccccggcacccgcgccgcgcccccccctccgacccgccagggccgcgggccgcgcccgcgccccgagcgcccgccccgggccgcgggcgcctcgtcagccgcacgcgcggcccctcttcgctctnnnnnnnnnnnnnnnnnnnnacacctgtaatcccagcactttggaggccgaggtgggaggatcgcttgagctcaggagttcgagaccagcctgggcaacatggtgaaaccccatctctacaaaaaatacaaaaattagccgggtgtggtggcacacacctgtagtcccagctactctggaggctgaggtgggaggatcactggagccggggaagtcaaggctgcagtgacccatgatcacaccactgcactccagtctgggtgacacagtaagaccctgtctcaaaaaaaacaaaaaaaagatcaaaaagtgcaagaagaggaaacagtagattttgtataacaaagtacaaagtgttctttgacttgatttcaaacccatattgtgcattcccttgtcaaatttagtatcaaagaataatatccataattatctgacaagatgagtaatctccatttctaactatttatctgtgtggggctatagattaaatgtacaactagatatcaaaatccatatgttttctattacaccagatatttaaaagatttccaaaactaaaacaaaatcactctttccactattttttttggaagtagttgggtttttcccattaaaatgttatgtttattttcatatcaaagtgaattaatattttttaaacttctgttttaacttctaatccagtaaatatcagtagctataattcatataaataaaagctctttgcagttggaaatccattttttttttcccaagatagagtcttgctgtgttacctatgttagagtgcagtggcacagacacaactcactgcagcctcaacctcctgggttcmagcaatcctcctgccatagcctcctcagtagctgggaccaccagtgcacgccactatgcctggctaattttttaattttttgtagggacaaagttttgctgtgttgtcccaggtgggtcttaaactctgggctcaagctgtcctgccttggcctctgaaagtgctgggattataggcatgagccactgctcccagccaaggttgacagtatttttaagagtgaaaaggagtcctgtcaccaaaatttgaagacctctgccttcaataaaagtgatagatccatatgtatacacacatgcgcgcgcgtgtgtgtgtattgagagagagatttttgagtcaaagggagaattaaaatagatttcaaattttgtgaaaggaaagtaattaccacccactgatttctgttttctcaaagtataaggagaagtcactggctaagagtgaagaaaggaaaaacttttgagagaaagaaggaattgggagaattgttagagaataggcaagtattcattagaggaacacggctaagattgctaggcaaaattggattgctcacttggattagagcatgaaacaagttgacagcaaagagcataagcttcctttccccaccacagccccctccccacccatagcaactcgaaagcagcaaaagtttttgaagagtggcataaactggtatgtctttttagcaaaaagtaaaaaagaaacaaaacaaaacaaatagacccaaagaattctctgatggtccagataagagatgatggggaagcatatacaaagggatgtagtggcagtagaaatgatgaggaggagcctgggcaacatgacaaaacttcgtctctacaaaaaaaaatacaaaagttagctggccatggtggyatgcgcctgtactcccagccactccagtgactgaggtgggaggagggaggattgcttcagcctgggaggtcgaggttgcagtgagccgagacagtagcctaggcgacacagccagaccctgtctccaaataaataatcaggagaaaaaatggaatatttggtagatagaatgacagaatttggcaaaggctatatgtgaaagatgtaagagaacagaaagtgactggttgtcttgtataggaagtattaaaaaataatttttttttctgaccttgttatcatactctaccttgaagtataaaggggagggcagtatatggtctgcttagttgctgctattaatatctttaacttcatttaaaatacaaagaatacagtcttagaacagcactgttttatttagatgccttgtttcaaaggctctttcctgactctgacatgggagggtcaagggcacatggaaagtggtgacagtggtaagaaggcacctggataatctctagaaaccttccacatgggaaaatgaargtacagaagggttctgacttactcagggctatctcactagtcactgctactgtagggaccaaaaccctgaacacccgaatcctaatctagctactcagtgctgtacctcacaaaacgaaatgttattccacctttgtaaactgaaaaataatagttattttaagcattttttagtattttaaaatttttatcagttaataccagaatggaattgagtatggcaagattgaaaaagtgtcattttagaagagtttatatatgtggttagattatttgaaaagacaaagaaacatayatatttgttaattgactgtctctaccccagaatgtaaattccatgaagacagggattttagttttcttcactgtatcactagcttatcagttatataaaaaattctcggtaaatgactgatgaatgagtgactgagtggatgaaagaaatggactcttatcctaagagaacttaagaggactcatgacacatgtaacaggaatagtaaaaagaaaatgaattttttttttttttaaaaattgtctttatccatattgctacacttattatttgtaattccattttcctcttggagatgttaaaatagtttttatatgtaagtcttaaatttagattactctaaatacttctggcaaaattttaacatatatagtatacatatatccattcagcatttctatgtgctttgaaaagtattctattagatttttttcattttattgaaaacatctgattttgtttttgtttctgttcagttttaatcgcttggatctaccaccatataagagttatgaacaactaaaggaaaaacttctttttgcaatagaagagacagagggatttggacaagaatgaatgtggcttcttattttggaggagctcttgcatttaaataccccagccaagaaaaattgcacagatagtgtatataagctgttcattctgtacagtgaattttccgaacctctcaaagtatgttttccgttcttccacagaaatatgcaaaacagttcatccttttctactttatttattgttcccttgaaatgactgaccaggaaaaagatcatccttaaattttgaagcaagtgagagactttattaaaaatacatatatatctatataaacatatatgatagtggctctagttttatagagctccaagtgtattaaacatgacagccattcattcataaagatctggatttgctttaccttgttaatattatctaggggaaaaagtgcaaattgctccatgttcttctctcccttatgtaacatctcctgagggtgtttagttgcatggctgttcagaaaggtattaagggcttaggccaaatcttactttgagtatgttaaaaaaaaaaaaatgctgctggcttttctgaagacaggtgcttgaacttgtcagtttgttttaaataaatacaatagttgaaaatttttctctgttacatcagtaatattgttaaagtaatggatagaaccataacttacacatgaaagtcatatactagatccaatactatttagtttattatygaaattggaaggattcattgagcagcatagaagtttgtttacatgttactttgagatgctaggtatttgtggaattaaaaagaatcaggctcttttgtactttgtttttaaatctgtgatgcttttcaaatttaattcataataaattgatgcaatttcatacttaggaacatacaaaaggtaatgtaaactctgccacttttttgtgttcaaaattttggtttttatgaagccagatggattgaagagttacataagcatttgaatgctctaatataaggctaatrattttctgttagtgtttgaatatcttcattcctctcaaattcataacagttctatttaactgaattaaataaccatatgaaaaatcttttgggtctccccctttttacacagataattatttttgtcataacactttttaattgtttttcatcataggggcctttgctgaactacaaaaatgtgtaacaaattaaaatctgatgtgaatgatattaatgctacttttagcaaactgggcttcctaatacaaaattttaaatttccatttgtatcatgcttttaatatgcactgtaaatttcattaacttaaacattttttaatagccatggaactgacttcttaaaatctgttgcctataaatatttcactgctaagtacatacagaaaaacagtaattattgttttgccaaaattttatttttctacatattgagagtgtgttctccattttattcagaattcatagtaaagacgaaagaaaggcagagatctgcttggttgaatagactccttttccaaatccttattatgaacactctggtaattttcaagcctaaagaattaaaaaaaaaattctaatgtatgtgacaggttatgtgatagagggaaactggccttcaaaaaggactgcgtataccataaaagagttaagtattagaattacaaatggtaccactgctgtataaattttgccatgacagaagttattgaatatcattcattgtaggtatgatttagcagatttgactgaagaaggcagctttccagttcgttttcagggtgctggtcttcctcaagtaagaaattacgatgcactaggtgaggctacacagaaccctacaagagacaaaaccagctttgttttggagaattcatcagggtcttccacttttcatacccaattatagatatccaagacctacaggcagagctcttgatttatctacccagtagcagtcagaaaaactgtagaaatatggtcccccactcaccttctccccttcttcccttcccgttcctgttctgtgctggactaaccgaaagaaattaggagtgcaagactctctgtgcccaaaacacagttcatgaggaaacagacaagagggaggctcagagacaggtttatattgctacttcattttggtgactcccccacccccaccaccagtaaatggcccagggaatagctcacaggcccaacacaattctgtctgttagatcagttaagcaacacaattctatctgttagatcagtttagttgtttgtcttccagggaaagcagcttaccagtgttttttttgtttgtttgtcccgcccccccccatgtacttcccaagtagttgaaaatgaaaaggttaacaaaaccttttcccctgatgacttctgttaactacctagctcttcctaccctgacaactaaataggatggtatgtgtcaactgtatttattgccatgcagctttgcttttggtaaatatgaccctgactggtaagttgcatctggactgggaaatctccagatacacgacagaaagccacagctttgggcatacctgagtggaaaactcttgtaactgtatgtcctttaaggaggaccgtgagctgtcacctggggagataccatttcatagattgctgttagaagaccgtcttctgaaaggaggttcaaaattgtcctgctggtgagctgtgtggttcctgtcctatagccttctgagtagactggtgccaaatacagcctattgtagacttactaagtctgaatgtttggttgaacctaagatgatttggtggatgttgcagaagtaaaaatcttcctctgttgaaataatacacaactaaaagttctcctgtaacactcagttggccttaaaagccaagctttaggtcaactgaggatttgatctaagtccaaaagtgacatctcctatattccaaaatttctctcctcaattctcaaccaagaacaaaatcagagataatagtagttgtatttactggtattcatggtaaatcctttacataaattattctcttgatccttacaattccatgaaattggtggggttgtctttaatgatgcttattttatacatgaggaaagtgagtatgagagaagccatttttacaacacccacagctagtacacagcccatgattaaaaactcagttgagataacttggccatcaagaaattgagagcttttaggttcttatagaatcatggccattttccaaaatcagtattctactcatatcctcaaaaggaaggaaggaaacatctataatggagagatatagcctatgtatgtaataacacttagaacacagagtactaccaacttactttgatatacatgtacgtggggaaataagcatctcaatccagcagtcagctctggaatccacacaagaacaatcaggtgggggctgcacgggaaggagaatgtaagggattcctggggtttgttctcagtaatgggtctcacccttagtggggaaacgtcacggaccaatgtgacacgtggggaatcaggctcctgggaagtcaaatggaagagacttagtgcacagaatcagaatcttgggaaggcaccatgtcttgcagaagaaacctaaccctcagagagtaaaggggaaaaatgaagataaaaggacccaggagccacactcctgggcatgtatcccagagagataaaatctatgtagacataaaaacctgcatataatgctcatagcagctttatttgtaatagctaaaaatcaggaataacctaaatgcccctcagcatatggttgatatggtatgcccataaaatgaaatactagtcaactgtaaaaagaaacaaactattgatagaacttaggtctcaagggaattatgttgagtgaaaaaaagtatcacagggtctcactgtatgattccatttgtataacattgttgaaataacaaaattatggagaacagattagtgctgtcagagttagggatgggtgggggagaggaggaggtagatgggtgtgactgtaaagggacagcactggggatctttgtgatgacggaacaggtctgtatcttgattatggtggcagttaccaaaaatctacatgtgatagaattgcatacaactatacacacaagagcatttaaaagtggtaaaatttaaatataaggtctgtggtctgtaccaatgtcagtttccaggttttgctattgtactacaggttatatgagatgttagcactgggataggctgagagaaaggtacacaggatcttttttttttttttttccctttgtgaatctatgannnnnnnnnnnnnnnnnnnntaacccagaccctttcttcccatttgatgacctagtattgctggtaactcaacataaaattacacccctagggaaaaaaaataaagtcactctaaagcagaaattgaaaatgagaaaaaggagagtaaactttaacacaatatgctaatatgaattaaattattagatatttaaaaaacctgaaatagcaacttaaaaactcagaactggacaaacaaaatgcagatgtgaatgactggctaaaatcaggaaaaaaattcggagaaaaagacaaacacatatcagatgtgaaggcaattataaagtatctaaggaagaagagatacaaccaaatgtaaaataagggatatggaagatataaatgaaaagagccaagaaaatgaaacaaaaaggctaaaagaaaaatcagtaagtgataaatgtgaaagtcaggcaaagatctaatagaactaatttgagtcctggaaataagttggaacagcggttctcaaagtgtggtcaattagaccaatctggaatgcgagagaatctatgacaaccggactggcctattcaaaaagtcaatgttgcaagaagaaaaagatggggaactgttgtggatggaaagattagcaacaaatcaaatgcaatgtataatctttggatcctgattttagaaagcatgagacatcttggggacatttgagaaaatttgaatatgggtagatattagatgatgttagagaactgttaacttctccagttgtgataatggttttgtgtttgtttaggaagatgtctttattctgagaaaatgcatgctgacacatttggggtgaactattatgatgcttgcaatcagtttcaaaaggtttagaaatgtatgtgtctatacacacacaaacacacatgtataaatacaggttgaacatccctatttccaaaaatctgaaacctgaaattcgtgctccataattcaaaactttctgagcaccaaaatgatgctacaggtagaaaattccacatctgacctcacataacaggtcacagtcaaaatgcaggtgcacaacacagtttattcggtctccctaaaggaaaaaacccattttaaaaagccatccagcagaatgccacatccctagaaagacccacttcctggcccttcagctgcttctgtttctcttcacctacaaaaataaaattacagtatacaataaccttttaaaatacagcatcattaagtgggaaactgaaagcctgccattgttgttgccgtttaacagctgatacaggtttctggtgatgctactgttgcctagctaccctgaccacattattttttcactgtatcagtggtgtgtcatatttttttttttgccatccttgttcctatgcgagttatgtcatattttttactgttaagtacttatgcatgaataagtataagaaaataactgcttattggtagcatatacattcagtcaggaatgatggtgacatcaaccaaccacaaattacccacatgagtggctgagataatgacacctttgctttctgatggttcaaggtatgcaaacttggtctcaatgcacaaaattattaaaaataatgttatataaagttaccttcaagctatgtgcataaggtatatatgaaacaagtgaatttgtgtttaaacttgggtcccatctccaagatatcttattgtgtgtatgcaggtattccaaaatttggaaaaacatcccaaatccaagatgcttctactagtcccaagtatttcagataagggatacacaacctatatagcaaaatcactgaatctaagagatgggtatacaaagatcactactttcagttttcctttttgtttgaaaatgtacatgacaaacatatccatacagttcattgtaacattacaattcccaaatcctttgggaaaaatccacctacacacacagtctctctttatctaagtggattcaagatgctcctttttacaaaacttaaaaagattttgcagtggtggcactccagcctcaagtgagtagcatagtcctgcctatttaaaaacatcttagtattccatttcactcttaagttttgtgttccttccattccattagggaatagaactttgcatctgatgacaaattcagtttaccatgagactacaccacatttaaagtaaactggccaggtgcggtggctcacgcctgtaatcccagcaatttgggaggccaaggtgggcagatcacttgaggccaggagtttgagaccagcctagccaacatggcaaaaccccatctctaccaaaaatacaaaagttagccgagtgtggtggtacaaccctgtaatcccagccactcaggaggctaaggcaggagaatcacttgaacccgggaggcggaggctgcagtgggccgagattgtgccactgcacaccagcctgggaaacaaagtgagactctgtctcaaaaaaataaaaaaggaaactactccatttttagtcatctccttacttagttctttacttacacaggttagctccaagatatatcatttaactactttatgtcaggaacccacaacatcctaaccactgtcaccacaccttctcttcaagatttcaacttagaatcaatccaatttgaaaatccatccccctgtatatcccctatagatccatttcccctcctctacaaatatttctttgcttgatctcccatcccaatgtgatcaatccttagaaatctcataccattttgcattgctggtatccaggatgcaaaataatctctttgcctgagccatggagatttatttctaccactcttatggcgattatttattttaccctattatttgtgaagaagcctagaatattttatatttacacggttaaatggtcacaacatttaaaaagccgtagaacagttatagttcatatattaagtttagaattaaaagaaaaggcaatgtttattagctatttcataaatcttctctgaaaagttctcaattcttctcactgaaacttgtaagcaactgagcagcttctgtctgtatctaaaatggaaaaatac

SEQ ID NO: 94576 - DNA, 470312 bp, Homo sapiens
  misc_feature (1)...(470312): n = A,T,C or G
ctacttactctgagatttgtttctggccaatttttgggagggaaaacctacagcaaacacaccaggggaacatgtcctttagattgctgcttctcagacattagtgtacccaagtggcttctggagcaattgtttaaaacagtggttctcaacctttatggcaccagggaccggtttcatggaagacattttttctacaaaacgggtgttggggggaatggtttcaggatgaaactgttctacctcagatgatcataaggcacatgcagcctagatccctcacatgcacagttcaaaatagggttcatgctcctatgagaatctaatgccgccattgatctgatagggagtagagctcaggtggtgatgctcggtccccgctgcacacctcctgctgtgctgcttggttcctaacaggccatgggctgctcggttctgtggcccaggggttggggacccctggtttacaacctagggtcctgtcctcacttgcagggattctgacccagtggatctgccacaggaccaaggaacctgcatcatcatcatcatcatcatcatcaagtcacttccctagctgatcacacttggataaacccagattgacaggcacagtttgcctcccttacttgcttgtatgtccaggttgggtggaatccattgttgcaaccctccttgagtctagttcactgcccagcgcccaggtggtgctcaatccacatatgctgaaggatagaggcaatgtgaggtgaatccttttataaagaaccgtttacaatgcaaagagttgcccactaataggtctccatagttaggtttgcatcttaatggttgaagttttcttaaagcagagatatacctcgctcgattcaggattttgacaaagcaacagcatcctgaaaagaagaagtgaataggggtaattatttttgaaggaatcaaagccatgtcctcctgcctttggtaaagatgtacggagttgcaccatttattagtgcttctcaacttcggctgctcactgggatcaggggcttaaaaaacactgatgcttgagtcctacccctagaggccctgtgtaattggtctggggtgtggtctgggcatcaatattttgtaacattccctaggtgattccaatgtgtgtccagggctggaaaccactgacctaaaatgtgtgggatccctggagagaggggtaagagatgcatttcttgagtcttacaaggagccctcttggactagagatggcaggtgccttgaattctgtgatccaggactacccttaaatcagaatctaaaacatattttatatatatatatatacatgttttttacatatatacttgtgtataaaatgtatatatgtgtccgtgtatgtataaaaatagtataaacatttatacctgtgtatgtataaaaagttttttacatacacacatatacatacacatgtacatatatatacaaacatatccaaaataatatgtatattttgaaagagagcaatagccaattgttttataccctctaataaaaacattttttcctgattatcataaactattgagtttatgcagaaaagtatttcaaaagttacagattttctcaaatgccaccacacaggagaaataactgttaatatatctggtgaccacacttctactcatccctctgtgcctatatacacatgtagcctagacacgcaactgaacgtcaatagaatccttatgcattctgaactagaatctgtgttttgtgagcagtatggcatagataactttccataaacctacataatcattcttataagatctcaccacatttaagctctaattgcacctgataaacggaacatctactgtattgtgaaagcttgctgtatacttttaaacatgcaaggcaagcagcagtgtttgagggctcctgtgccagtggagaagcctgggtgtgtccaaacaggcctgcagcgtgctgttggactgtcacacgcatctgggcagttgtgcactggggacagaagggcttgacgagccgggcgacagcactttttgtagtgctagcatctgttgaattttagtttcagtctttaagccctttaagaggttctgttttcacctgccttctagaccatgcagagtgtatagtccaacaatagtcagcatagagttgcattctgaatatccaggaggcagagccaccgagggaccatctcagtgttgatccatggctgtcatgtgggacgggggccttgtgttccaatcgccccagtaatttgaaggaagccagtaatatgtatttctatttgaaatctcttggtttttaaatgtgggctgacaattgtttaaaaattgaaagcatagtgagaccaaacaaaacacacctggggcttcctatagtcatctggaaggcagtctgagatgtctggtctactaagctgtttgtggcattcagtctacttgagttccaaaaatattgactgaatgcatagtcactgtacaaaagaatggaaattacaatgataaaaagtgatgatccttgccttgggtggggtagcttttatgatccccagaccagcacccaccatatcacctgggagcttgtcagacatgtaaattcttgggcctcacaccagatgcatcaaattagaaactgtattctaagaaacctgctcggtggttctgatgcctgctgaagtttgagaacaacaggcaggtgtgggaaggggagttacgcatatgggcaaagatctgggggatggagaaggtggggtgtgaggcgaggaggcttttcagaagtgaatggctccacctggatcttaaaggatgagtaaggagttggccaggtgaagatgagggaggagtacaccaaggctagcaggcagcaggagccagagccaggcaggaagagtgtgtgaagggcgtgtgtgggattgtccatctagcgcatgtgaccgagtgctggagtatgctctgggaaatgaggtgggagaataagttggtgcaggtgagctggattgtgttctgtaggggctacagcatcacgggagaccctctagtagtggagtgtggcattgggtatgtttgtagggaaatcacgctggtggcgaggttcaaattccttytggatagaggaaactctcctggtgtcccactggtctggatcctgattcttgcctttcctrgcgtgacttggatctgggtcagcaattcccatccttggatagggtggtgggcagggagggcccggctgagtgaagatgtggctattgctgcgtgtgaaatagtgacattggtgtctctgttcttttattcttggaggaatgtgcacactcttggagaatgtgcacactccaagctgagcatttaggtggttgcctgtgttctcagcaattgcaatggtctttgtaatcccattttaaaatgtcattttaaagtttctgcagcaaaggttttggtaaaaccctggatctatttctttttcttttttctttctttcttttttttttttttttttttgagataggttctcgttctgttgcccaggctggagtgcagtggtttgatcacagctcactgcagcctcaacctcctgggctcaagtgatccttctgctgcagcttcccgagtagctggcattacaggcatgcaccaccacacccggctaagttgttaaaactttttttgtggagacagggtctcactatgttgcccaggctggtctcaaactcgggagctcaagtgttcctcctgcctcagcctcccacagtgccgggattacaggtgtgagccactatgccccacccagctctatttctttcttcagacatttgcggtgtctaaatggaagaaataagttgaactcaaggccatggaaattcatgtctatacctaactgggactcatttgttcttcctccgtccctccctcccctctctcttttcttacccccccttttttttttattataagataactttggttatagacaactcttgagagctttccaagtgctcataagatttttttaatacttagctatgataacatccaaattttcctgatgtgaggatatgcagttgtggttaaagacttctactgagatagttgaccattgttctgaaatactttggatgtagctctgagtggaggcaggaatatgaatgtgaattatttatattcatgtggtggttctacaaaacattttagaagacagcaagaatagccattgttcttagaacttctagatcttttttttgaaatggaaatcttttcttttaaaatgtatttggtgcagagtgtagtaattatttaatttctttctttttattttttgagatagagtttcgcttttgtctcccaggcaggagtgtagtggcacaatctcgactcactgcaacttccacctcccaggttcaattgattctcctgcctcagcctcccgagtagctgggattacaggcgcccaccaccacgcccggctaatttttcgtatttttagtagagatggggtttcaccatcttgggcaggctggtctcctgacctcgtgacccgaccgcctcgacctcccaaagtgccggactacaggcgtgagccacccgcgccaggcccatttctttctttttttgaaatgctgcggtgtgacagacgatgggagctggatgaattattgcctccccctgctggtcatttttatataacatcttatatatagtaatatatagtaagagtgcagatgataaagcaaagctaatacccagaaaaacaaaagatactaagatggaatttattaatttttaaaaattgcccaaattagtaatagacaaattgcccaaattagtaattggccttattagtaatagagtgtagatggtgaggcaaagctaatgccagaaaaacaaaatatactgagatggaatccattaatttttaaaaaattgctcaaatgcagtaaattttaaaatacttacctttgtgagagggtggaataaatttttcgacttctttcattctttgtaaaacgatataataagtttagaaagtagttactgtattggttttgtccttttgctgcaacttctcatacattcatgatgatgttagcaatctcctttattctgttgatgcattgaatgcttttttctcagctagaatgaacaggtgtttcttgttgattgctttaggcatttatccaagtagatcacaaatacccatgtctgtctgctatgtatacatacaacaaccaaggtataatgtttatgggcatgaaacatggtatttaaaatgagtgaaacctgtgtttccccttaacaaccaatctcttttacccaatacaatgggttcataagttataagggacattaaatatgactctatccaatgataagttatatggagacttttcgtaggaggtagcctgccctgctgagaagctttaggggtaaggtttctagggcagttttctgaacaattctattaatgaacttccctgtttgttagcatctaaatttaatatctttctgaacataaagccagctttttatttatcttccgaaattcctgcctcagctttgcccctatggatcctaggaaaccagattcatttcgatgcttggggtgcatttgcatgttgacagacagcactgttagaggactcttggggccaaaggacgtccactagcttggaagctggtgtgtgtgcctcttactaagtggatgtaagccaattaacttctttaggcctactaaactggatgttgttgagatcctctctagcttcatccaaatattctaatcaaaatgattgagacatttgacttcatttaggtgttgagggcagccttggaaatacagacacggagggagtaaagttgcttttattcacttacaaagactcttaaatacagcccgatgtcaaagcatccaggggattggctgtactggggcatatttggtggacacattgctttatttatttaaattgcatcctcttttttttttctagttgcaaatgaagctggagacaagaatgccagaccactggcccgcttctctcrtgagtaaatcttgtttcactcctttcctggtctccatcagaaaatgttctccagagatctttcccccatgcggtatagctcttcaattctgtcaggtgttaataaaatagtaatgyaggaaatatcatctggttaacatcccacttgagcccaggctggtgagctactcattgctactgccttttcaatmcttagaactgtggtttccaaattgtgctctaagcctttgctattccaagtatggtcctcagagcagcagaatcgacatcacctgggggctttttagaaccmtgaagcctcagtcccccgaccaccccttcagacctattgagtcagaatttgtattttaacacatytacaggggatgcctgttcacattagagtttgagaagtgctgtgctaggactatcctttcaatctttcaatgaatgttttatgaagataaagtgaggagaggtacgtgaaatgcttgtagctatgaaggcatcatcaccattcaaagtggacttatggactaactccactggcttttcctcagtttggtgacactttgaagcttagatggattgaatgggtttccttaggcattggggatattcctagggctgtggttaggccatggggcttcccttgactcctttgtctccaggtcttgatccctatgagtaggagtctaaagcctctcaatggtttctgtaccagtgtgatcagcaaattatccagcaagttaatgcacttcctggaacgaaaacctggattccaaagaaggggggggaaaatactagagayggatgagggtggagtggagacgctccccaaacccactatgcaccaggtggagaaatcgtacaactgtaaatagaaacggatttatcactgcctcactggctttcactaaaagtaatttcaytcacactatctgggcctctgtcttcgcacctggaaaatgttcaaaattggacattgttacattaatttttttttttttgccttcctaaaagtcacctcatcgttccctctctagtattgactacaaaaagacttagtagctgacgtgccatctgacttttttccaggtcagtcaaaaatgttgctgtcttttgaaattgtggccagggaggaactctataaatccctagtcactgcattcctcatgcagggttgactaggtctgagtgtggacagtgccatagtaaatcttattacataaagctgaaagtataatttctctatttacagggcttcttctaaactctgcctcccagctctttttggaaggctttgaaacgttgggattgatttcctagaaatgatttttatagaactgtaataatgtacgataatgaaagagcatgaagtgctcatattttagaaattgtgtaataaaacactcgcttctcatgagccccattcctcactgccctcctacctggaatcattatttccaaaatagatatttcatcccacagctcaatgaggttgaagaatatgcttttatcccatttttttcttcatctcctgagcagttgtcaggcaaataaataagcatgaatcgtgacccaaccacgctgtgagggctgtgctgggtgccccttcccccatgggagtcccagaggctcactacaagacagacgaaggttgsggggagggcggtccttgcatgagagttgaggcaatttgtcccttcacagagaaaggaaggtaacttcttgtgtgaacttctcaactgtatgactgggttgaaaggatgatgtgtcttcaaagcttattatcttgagacaggtgaggacatgatgaacacgtatctgtgtaggaaaaagtaattagtggcaaaccagttaggttggactgatacagggaaaaaaaaggagaacgaaaaagctcctgagttaattgccatactccggaaaaagtcagatggcacgtgagctactaagtccttttgtagtctagagagggaaagattagatgacttttaggaaggcaaaaaaattatttttaatgtagcaatgtccgattgatgcttacttcactttaccaccttgaaactgaccttcrttgtgtggtgtgaatgaagagttcagtttgggaagattgggaggattcggatgataagtttttttttttttttttgagactggaagatgaagtactgcaacattctctaatttttgcgtccaacaagacagccttgacagtgtgcgttgcccagtacggaatcaggcacgacggggattggcgggggcgggtggccagagcctgtgctgtgatggctggaccctctagaggtcagcagagatctgggagtggggacttgggaagggctgcttctggtggtggatgctgtggagttagtcctgtgagactctggatctaccaggccccttcaccacccctgccccatcattgcaggctcaagcagtggcttccaatcaacctgacttcagttagagcatctgcctagcaactgtgggcacatacagtaacatggggaagtcattctcctagaagtgagggttagggaagagggaagggaactcaaaggaagcagagaggatctcttcccctcacaaatgctgggagaatgacagtgtccaggacagtgaagagttgagactgaccttgacttgagtgcgctgtgtgaatgcaggcacaccagcttccaaccagcagatggtttgagaatggcatctatcacaaggccagctgtcctggggcgagagccaccgggtgtgggcactgccatgctctgcartgggcagggtgagctagaagaatacctcatgtgggtactgcatggtgggcacctcacakgggtgccgcatggaaagtaccccatgtgggtaccgcatcgtagccacaaggrcagtgtggggaacagctgatctcccctgckcaggtccaggcctcaacttggtgaggagctcctggaacccactgtggctcctgacattggggacttctgggatgaagtcagctggctgtggggtccctttctagtcctgctctctgggatgctggtgaagctgccctccagtgccaggmcctaaaarccctcctctctagacatgtctgttttatgcatctgtcggtctctattagacagtcagctccttgagcccatgggccgtgtctggttgactgcacctgacctagagaaaaacgctgattgaagactgcataaactgrcccctttctgctcctttccccctgctcctctgcatcctaatcagtgagccgtcccattatcagcatacacaatccccaaatccccccagaatatatcctcaaaggtctcctacatgctagtgggagagtccccagcagccaccatgtaagctctggaggtcaagccggggtttgaattctgtgtccagaattatgaattctgtgccgcgttgagcaggtaaccttacccctctaaaaacacattttccacaccttgatcctagaacagtactgcgtctagaatcggtttcttctggtgggttcttggtctcgctgacttcaaaaatgaaaacatggacccacctggtgagtgttacagttcttacagatggtgtgtccatagtttgttccttaagattttcagatgtgtccrgagtttcttcattctgatgggttcacgatcttaatgactycaggggtgaagctgcagaccttggcaatgactgttacagctcttaaaggtggcatgtctggagttgttttccttggggttgcttcatggtctcgctggcttcaggagtgaaactgcagaatsagtgttacagctcataaaggtagtgcagacctaaaaagccagcagcaggaaaattcattgcaaagrgggaargaacaaagcttctgcagggcacaagcagacccaaacgggttggctggggggtggcctgcttttattctcttttttggctccacccacatcctgctgattggtccattttacagagtgctgattggtccgttttacagagtgctgattggtccattttacagagtgctgattggtccgtttttacagagtgctgattggtgcatttacaaacctttagccagacacagagcactgattggtgcatttacaatcctttagctagatagaaaggttctccaagtcctcacycaacccagaagcccagccagattcacctcaatgctagagcttatttccaagttgttgtggatgatcacatgcaagggtgaatgttaaaatacttgaaaacatgtgacgtggtcactgaacatcagaacagatgctggtcatggactatgtgaaggactagagtccaggagacccctgacaggacagacatggaccctttaattgctggatgaagctggggcagcagaggtggatattggccctgataacctggaatycattatatgaagcacagggactgtataccacaagcgctcaataagtgtggctggttgttattaccttgagttttcagccttcctcccctctcttcttcccttttttctttaatttcatatatacttattgaagacttttctgttcttctgtgagccatggagataacacagatgagttggtttgtcttcaaagggtttgcagtctaattagggagacagaagtgactactacaatacagcatgtggaaggaaatgctagcaattggtaggaggagctggragagtcagaacggggacgcttcagccagcctggtgtggaggtgaattcaagggagtcctcctggagaaagtgagcattagctgaggcttgagggtctgaatggggataataggtaaaaaaggtaacttctaatcttcattggaaaaaactccaaataccacatgtaagggaatgaaggccacatgtagtgttcagacatggccacatgtagtgttcagacgtggccacagtgtggcagaaaaagcccagattttggtggcatcyctctcctctagaggatgtaaaagacgctgcattcagtgcattggacagagcttctgtcaggagtccagggcattggaggagcccgagcgagggagacagtgcccacagagctctygtggctgggcagctgtatgctggagttctggttgctttcctgagggaggactaatttctcccccaagatgagcaatcgtggacaagaaaatacaaaagtcctcccttatctgcggtttcactttcccagttttgttacttgtggctaatagcggtctgaagatatgaaatggaaaattccaggaataaacaattcacaagttttgatttgagtgctgctctgaatagcgagatgaaatctcactctgccccacccacgatgttaatcctccctttgtccagtggatccatgtgtagatgctacctacacgttagtgacttaggrgccctctcgtttatcagattgcagtgcttgtgttcaaatcacccttattttatttagtaattgcctaagtgcaatttctaagtgcacttagtaaaaagtgcaagagtactgatgctggcaatttggatacaccacagagaagccagcaagtgctttctttaagtgaaaaggtgaaagttcttgacttaataaagaaaaaaactgtatgccaaggttgctgagatccacagrgagagcgaattttctatctgtgaaactgtaaagaaggaaacagaaattcgtgctagttttgttgttgcactaaagctgcaaaagttatggccacaggacaggataagtgcttagttaagatggaagtgttattaaatttgcggagrgtagacatgarcagaatcgtgttctgattaacagcaatcatgttaggcaccatccctggtttcaggcagttgttggaacgtaccccctcggataatgggggactactatagcggtatcaaaagcaataagaaaatagagattaattaagaatccaggtatttttggaaatagattttcctgtgaaagagctggagtacttagggtggatgggggagtgaagcaaggggcggcccttcgtatttttgtgctgggtgaatgatcaccttccctctgcagagatgggaaatggaaggcagagatgtgcagtggggtgatcgctggggttggttgaaatagagggaggcagcacctatgacatggtgatgccatgtatggagccccagagggaactcaaaatcatgtccgagacagtgctagagttcagccagggaactttactagatcagttgttatggctaggagggttggtgacaaaagaagggagcttgaactggggatggatgaagacaaaaagaagaagaagaaatatgtgggaggaacgactgagaaatgccatgagtgggggactgtgtggctggtggctgggctttcagtgttctcgggggcatgtactacgtttgagacagaaccatataagggatccaggacagatgagatcacgtacatgtagggtgctatggcaagcaaaatagtcaaactaatagaaatgcagaattggatggtgtttgctaggagctgggtgtggggaggagcaaacaggaagttgttgctccatgggtataaagtttctattatgtaagatgaataagatgtggagacctgctgtacaacataatccctgtagttaacaatatggtattgttcaygttaaaatacattaagaggatagctctcatgttaagttttcataccacaaaaaccaaccaatcaatcaaccacgcaagcaacacaaaagaacacaagacagctggctactagcttcttatctacacttataatcatcctctcgaagctcccccagtgacctgtgrcacatccatgtttcagagccacagttagaccccaacttgtgttgacccaaaatttctctgcttgcccacaaggggacttcaccacyttatcttaccccatttctccacccctttcatcaaacacagttgttatcaggcaagccgatcagcttggttcagtcaacagatgtattcattgggatttgaaagatttcaagttaaagtagagtttacaaatgatccagtccagtgctcaccactctgtctaaagctcaaatcccttgtatgacatccctgtcatggggtcatgagctctttgcaggagcccatccagcggaggaatattcactgtgtcctggaaagcattgrtggtygtggtcagagtgatggactggcatgtgtatgggggtaaggggcaggacactgagactcactctgccttctctttttgaatgtgcttgatagagtctttgaaatatatmcaaagacatatccctaggtccctaatatgttagccagtggtccaccagtggactggctgatgattccataagtagcttctaagagtttatggatgatacatgtaacccagatgtcagctggaagctccaagtccattgagatctaggtgaagaggcttaacactgctgttgtgtgctgacatttggaagttcagagcactccctgatgcttccgtgagtacctgggatggtggtgttcttctgaccctgatttcctacctctrtcgattgctttcctctatttgcttctggctatcttcctattgctctgacatagtctcagatgtgctacgaagctcctcctcctcctttttctggagagtaaccaaaggcattggtcaaagcagagcttgactgaagattaagaagggatgaacaagagagagccacaatatgcactgcaattgcagacagaccatttaaattcagtttgattttcaacagtccattyagccattctaccaccaataaaaattttaaagactgctttgcccatgctgctcctggcctaccactgtacatccttttatcctcatcctcctccattctttaccctttatttccacctcccttttaggaatcagagccactcctgggatctctcatgcagagcagccacttgactatctctcttgctttgatggatctgctcacacccttgtcctcagcatctcacgtcctactcctttcaacttatatttgcctaaatgcagaccagtttctgctcccttaatgggaatgctgtacccctattgagataatagcaaatatttacccttgctacatgtgtacacgcttagataattgaaaaatatgaatagaattttttttgtatgtaatgtaaccccagggagggcaaggaagacgtgacttggctgttgcactccaagcacctcctcctctatcctctcaatatatactcctttgaataaagttaagatgaagttttaggtttcggcaagagacagacgaggataacctgaaaaccttctcattttttacaagcacatagaaatgctgagtgaaatgttttaaaaatgcttttaaatgcacagttaaacttgcaataaagaaagggaaccccacaggtgccagcaatgaaggaagaatttaatatcagtacggtaagctgttaacatgtgtgcagattttgcagctatgctgcatgggggtggtgctgttaagtccatggaatctagtaacacatgttttaacatctacatggggagaggagataagacctttggctatgcagggtggagaagttggatctgaaacttctgcctaactcggactcttaaaacatatggcagattgtgttttccaaaaatatttgtaactatatctcccatcccacatgctcttcttgcaatgtgatgctgacaagcctcccactgagatgrtgaggcctctgttttcttcccttgagtctgggtggcctgtaaatgtggcagagatgatatgatgtgacttgcaaagttagattatcagaagaaacagcttccacctgctgcctgttgggatacttgttcttagagcactgccataatactgtgaggaaacagaggccctgtggaaagcccatctctgagagcttcccaaagtgcaagtttttgagcaaaatgggtagttgttgttgttggaagccacaagtttggtgtgatctgttacgcatcaataggtagttgaaacaaggtctatgtttctaataaaagagagatcaggaaaacaaaatgcacccattagcatagaggggtaataaggtaacttgcttggcttttctggctcttgaggaaaagtcttccctgggcaattgaaactacctgaaaggtccaggaacactttgagcctaagaaattaacaaacattagttctgggctactaatggcagaatcaaatgaaaaatcttttgaaatacaacccaagtcataagatattctcatggagaaaacaagaccaactaagtatgagctcacagtcaaaattaaaaacaaaataaaacaaaaaacctataagaggcagcagtcctccatgatgagcaagagtcagcaaacacagataattagagcctaagaacttgagatgcaggtcgagtgtcctttacccaaaatgcctgggaccagaaatgttttggattttgagtttgtttctgactttggaatatttgtgtatgcgtaatgggatatcttggggatgggacctaggcctaaacacaaaattcatttgcgtttcatatatatcttaaacacatagcctgaaggtaacattacacagtattttaaataatttcatccgtgaaacaaagtttgtgtacattaaatcatcattgaactgcaacctgtcatgtgaggtcagatgtgaaattcccacttgtgatgtcatgctggtgctcaaaaagccttgaattttggagcattttaggtttcaattttttggattagggatgttcaacctgtggtataatgacaaactggaaaaaaaaagactaggtctatttaaaaatgacagaagatataaaatgagttgaaactctaagaaaggaacaagaccttggaaaaaatggaaaattttaaagataatccgtagaacttcaagaaatgtaaaatatagcataaaaccccaacaaaacaaaacccaaacacagtttaccaactgtgttgaataggactaaaaggagagataatgaaccagaagaaatatatatctgaggagactatccaaaatgtagcatagagaaatggtggatgtaaaagaatggtcaaacactgcggaagacagaatgagaaaggccagcacacatttagtaggagttcagaatgaaagaccagagagaatatggacaaaatagtaactaaagatctagtggctgagaatttttcagaattgactagtgatatgaatcctcagactaatgaattgtacccagtttcaatcaggaaaataaaaaatctattggcagatacattataatgaaactgcagaacagtatagacgatgggcaaacaccaaarataattgaagagaaaagacaggttacctactgtgtctgagactacgagtttagtgttttgtttttttttttwaatttttatttttggtagttttgctcttgtcacccaggctggagtgcagtggagcgatcttggttcactgcaacctccgcttcctgggtttaagccattctcctgcctcagcctcccaagtagctgggactacaggcatgcgccaccatgcccggcgaattgttgtattttttttttcagtagagacagggtttcaccatgttggccaggctggtctcaaactcctgacctcaagtgatccacctgccttggcctcccaaagtgctgggttataggcatgaaccactgcgcccggctgagtttctttttttctatgttaaaagaacttcagtttttagctgggcctatgtccccatatccaaaaacagttaaagctaggtgtgaccatgtaactaagttctggtcaatagaatgtaagcagagctgtcaaagaaaagtttctggaaactttcttgaggcttttgtgtagtcttcatcccctttcttctttatcgctttttcatcctgctgcctaggacacaaatgtaatgcttagcactctagctgccatcttggaccacagtgataatgctcaaacccaagggttggtagaatggtaatctaaagattttgtgaaacagagctgctatrtcagttctgaaaggcttacatctcactcaacagagatataaacttctatctctgatttttatgtaacagagatataagcttttatttcatttaatctaccggaattttgagtttctgttattcagacataactaatcataactgatgtatctatcatagattaattattagactgactgtagacttcccaatagtttatttagaagccagaagtcaaattgaataatatttgtatagagatgagggaagaatactgttgacctgaaattttaaattgagagaaatatcatttaagagtgagggcaaaataaagacatctttcaggcaaactcattctgagagaatttatcatatacgtccttcctgtgataactgctaaaggatatacctcaggaagactgttgaatccagaaagaagaatgaatataggatacaaggactaaccattatttatgtaattcacaattaaaaattaaaatgaatattaagatgattgctgctatttagttttaaaaaataaaaatggctttattgaaatataattcacatattataaagcttacccatttaaagggcataattcaatgatttttcatatatttatggagttgtgccaccatcawcaacataatctaatttcagataatttttgtcaccccaaaaagaagtcctgtgcccaacagttacttttcatctgagatccatacccacagtcctagaaggctatttaaatatttcttttcttatagatttgcctattctggccattttatataaatgaagtcatacaatatgtggtctattgtgactggctatgtttttgatttagcataatgtcttcaaggttcatccatgttgtaacatgtgtaagcaaatcattcctttatattgcaggacaatattccctagtatggatatacgttttatttttcctttcctcagtcaatggacatttgggttgtctctaatttttggctcttgtgaataatgttgctatggayatttgtatattattttaaaaagtgtatatgtgtttttatttagcttgcttatatacctctgaatggaattgctggtttatatggtaactctaagttcaacattttgaggaacttccagactgttatccaaagtggttttactcttttatatttctgttcacaatgtatgagggttccaatttctctaaatcctcctctacacatggtatggttatttaaataaatttaaccctaatgtgtgtgaaatattgatatattgtggctttgatttgtatttctctaatgactaataatgtttagcatattttaatatgcttattgcccactcgtatatcttatttggagagctagattttaagaaaaggggtagcatcccattctctgaatttctagttgaaggaagcatacttaagatggaaaattgtcatcacaaaaaaactgccaaacttatttattaaccaaaagttgaagaaaatagaaacccctaaagtgttagtttccaaactggactcataatttctcctcatccctatagaagttcctactcctgtgttttctaactgaattggtgccatcctatttattaggcaatattaactgaaaacctacaaatcatatatgcatctctattctccctcatcagtcaccaaattccactgatcctgactactgaattgtcttattcagatcattctactttattctcacagctacaactttgttttaaatccttacattccttatgtaatggattccactgagtctccgtcttcctctgtgaaatcaattctcctccctgccagagcaatcttttaaaagataaatctgaccatgtcattctccctcttaaaagccttcacacacattctaggaagataaaatagacatacattttcctatttttcccatgaattacaactaaaacccctggatattatatacaaaataaacaaaagaatactctgaaggcaaaaagaagaagacagagtgactagacgacttgggacccaagaaacaacatggtgatgagttccctgagttttctttttttatcatataccatagacttcgagctgaaaaagataaaaacctggaaatgacaacaggtacccaaaaaaagagccctaacataactctactctctacctaaggaccaggaaaggggaagcctagcaagacagaaaacttttagataataaacactctactccctccaaacatcacagaaaaagctgtggccccatcctcacccattccaaaaaaggcttgctgggaaacctggatgtccaccctcacaaggctgtaacaaggtatctcaacacccttgctggcatggcatcagaaaaagttaaacagagagctggccctttcatctaaatcagccttcctcccatcatgatgtcagtggagaatatgtggggaacctaggctgccacttctaactgacagtaaccaagcatccctcttcctccctgctgagctgagtgtcaggggaggcctagaggagaatcaggactatagcattgtacaatgataatgaggtcattccatacacagtgtcagtagagaccatgtggggagctgaaactctcaccccttcccagcgataacaaagctacatccttcctcaggtgtcaatggagcaatggaagcccagtagggaacttgaacttctacctctatctggcataataaggtagtgcaccatattcctttgcttaatctgtgccatagaaagtcagttcaaacaggataaacctgaagaaacccatgccaaaattcattattattattattattttatttttaaaaatttgagacagggtctcactatgttgcccaggctggttttgaactcctgcgctcgagcaatcctcctgccttgacctcccaaagtgctgggattacaggcataagccactgaacccagcctcataattaaacttctaaaatctcaagagaaatcttgaaagcagccagataaaagagacatcttactcatagggaaaacacaatttgaatgagaacagatttttgatcagaagccatggaagcacaatatttttcaagtgctaaaagggtagaactgtcaacctagaatcccctctaatcagcaaaaatattcctcagaaatggaggggaaataaagacattataaaatgaaggaaaactaagaatttgttgccagcaggcctactctaaaagaatatctaaagaaagttctctaaacaaaaagaaaacaataagagaaggaaccttgggacatcagaaaggaagaaagaacacagtaagcaacaatgtggctaaatccaataatgtttccttctcctcttgagttttctaagttatgtttgatggttgaagcaaaaatgttagcactatttgataatgttctaaatgtatgtataggaaatatttagtacaattatatcaaagaggagaaagtaaagggatgtaaagggaggtaaggtttccacattttacttacacttccaaaatgataacatcagaagactttggtaagttatttatgtatatatagtgtaatatctagtacaactattgagaaaatgatgcaaagagatacacaataggtaaagtggaattctaaaaaaggttcaagtaagccacaggaaggcaggaaaaataaactagataaatgaaaaataaagaggacaaacaggaaataaaaaataaaagaagatgtaagccctgacatatcaataattacattaaatgtaaatggtctaaatatagtaattaaaagacagagattggcagagtgggttaaaaaacatgacccaactatgtgctattaaaaactcacttcaaatatgactgtatagacaggttgacagctcatgcaaacattaattgaaggaaacctgtagtggctatattaacatcagataatgtaggcttcagaatgaagaaaatgcagaggcagagagaaacattatataataataaaagggtcagcctacaaggaagacatagcaatcctatatatttatgcaccaaacaatacagttggaaaatatgtaaagtagaatctgttagacctaaaatgagaaatagaaaaatctacaattataattggagacatcaacagatctttctcaacaatagattgaacacaagacacaaattatgaatatcaggaataaaacaggggatatcaccacagaccatgcagatatcaaaaggataataagggaatactgtgaaccgtgctacacagatatatttgatgacttagatgaaatgggctattttcttaaaaagcataaactactggcctggctcacgcccataatcccagcactttgggaggccgaggcgggcagatcacgaggtcaggagattgagaccatcctggcgaacatggtgaaaccctgtctctactaaaaatacaaaaaaattaccgggtgtggtggcgggcgcctgtagtcccagctactcaggaggctgaggcaggagtatggcgtgaacctgggaggtggagcttggagtgagcggagattgtgccactgcactccagcctgggcgacagagtgagactccgtctcaaaaaaaaaaaammaacaaaacaaaaccaaaaaaaaaaaccacataaactaccaaaactcatccaatgtgaagtagataatttgaatagccttataactctatactaagaaagtgtagtatgtaataaaaagctgtcctcccccygcaatctcttgagtccacatggtgtgactcaaatattctagcaaatttctaaagaaaatttaacatcaattctacataatctcttccataaaatagaagagaagggaatatttctcaattcatgtatgaagctaacattgtcttgatgtcaaaactgagaaagacagtacaaaaagagaaaaattacagaccaaaatctcattaatatagatgcaaaaatctttaacaaaattttcacaaatagaattcaataatatataaaacaaagtctatgccacacaaccaagtagggttaattctatggatgcaagtatcattcactattctaaaatcaatcagtataatccaccatgttaataggttaaagaagaaaaattacatgatcatatcaattgatgcacaaaaatatttgacagcattcaatattcattcatgatagaaactctcagaaaaataataatttaggggaatttcttcaacttgataaggaagatctacaaaaaccttcaaytaactttatatttaagggcaaaaacggatgcttttctttaaaaatgagaacaaggcaagaatgttcagttacaccactcctattcaacatagtgttgaaagctctagccagtgtaataagggatgaaaagaaaaatttaaaaacatacagataaaaaagacagaagtaaaattgtcccttttgcagatgacatggttatctacatagaaaatcccaaggaagctaattaacaaaatttctagactaataaatgagttctagcacggtcacagtatataagataaacatacaaaatcaattctattcctgtataaaaataaaatcatatttacaacatataacaaggtgaaatatgtagatgtaaatctaacaacayttgtakgtacaagacttgtatgctgaaaactatgcagtgccatgagagaaatcaaataacatctaaataagtggagatgcatactgtgttcatggattggaagatgaaacatagcaaatatgtcagttctccctataattatatgcagatttaacacaatttctatcaagatcccagcaagattttttatatagatgagagtattctaaaatgtatacagaaaatcrtaggaagtagaacagttaaaccatttttaaaaagaaaaaaaagtgtgaggagtctatctactcgatttcaaggcctatataactacattgatcaagatgagtggtattggtgaaagcacagacttacaaattaatagaatagaatagaaaacccagaaatgaatccacaaaaatatgctgaactgatttttgacagagatgaaaaagcaattcaatggaggaaatatgaccttttcaacaaactgtgcttcagtattggacatctgtaaacaaaaatacgaaccttgacctgtcttacacattaaacaaaaaataattcaaaatagatcatgggcctaaatataaaactgtgaagcttatagaaaaaacagaaaatctttgggacttaggactaggaaaaatggacttgacacaaaaatatgatctataaaagtaaaaattgataaattgggcttcatcaacattaaaaattgatgttctgtgaaagattttgttaggataaaaagacattctacaaggtgggataaaatatttgcaaaccacatatgcaacaaaggactggtatctagaatgtataaagaattctcaaaactcaacagtaaaaagcaaacgatgcattttgaatatggtcaaagaacatgaacagacatttcaccagagaaaatataccgatggcaaataaacacataaaaagatatgaaaagggaaaatgcaaattaaatgcatgaagaatgaaatgcaaattaaaaccacaatgagataccactgcacacctacccgaacagctaaaataaaaatggtgatcactccaaatgctgagggtgcagagaaactgaattactcatacatggttggtgatacagccattctgaaaagtaacttggtagtatcttaaaaagctaaacatacaactaccatacgaccagcaattgcactgttgggcatttatcccagaaaaatgaagacttatattaacacaaaaacctacatgaatgcttatagcagctttttccgtagtagccaaaaattggaagcaacccagatgtattctaacagatgaatggttaaacaaactgtgctggactattactcagcaagaaaggggaatgagctactgatccatgcaacaacctggatgactcttcagagaattacagtgagtgaaaaaaaccagtcccctaaggttacatattgtgtgagtctatttgtataacattctcgagatgacacaactataaagatagagaacagactagtgactgttgggggttaaaagagggggtagggtggaaggaaaatgagtaaggctataacaggataacatgagggatctttgtggtgatggaaatctttgtaaattgactgcatcaatgtcaacattctggttgtgatcttgtactatggtgttacaaaatgtcaccactgggggaaacttcataaacagttcagggaatctccatattatttcttacaactgcatgtgaatttacaattctctcaaaagaaggagtgattaaaagaatttaatttgaaaacatcttcactgacttctcacggcctgcagaataaagtcaaagcccttagagtaccacataagctccttcaagctgacctcctctgtcatgcagtaattcaccatttaagccccagaaaaatttaactagttgctctcccaggatatttcacttctccatgcctttgcatatgctgtcccttctgcatggaaaatcctctccctctgctgatcaccaagaaaacccactcatttctcaaaactttgatcatagaccacctcttctacaaagcctggcctgactccccaggataaaattaattactttctcctttatttgacatctatatatttctgcatggttatagtattgcttgcttcacactgtatcctaagtatatctttaatggctgtctccccactagattctgagttccttgaaagcagaaactgccccaccagtcagtgtatcgtaggtgttcaataaatgtttgtttaattggactgaaaacagagtgaatgaaaagattcaagatctgtgccaactccaaaccaggagggaaaatccactcatcccctggaagttcttagagatycatactcagttactctactagacagaattcagatgcattattaatttacacaagaccacatgatttatcagtcataagttcctgtgatgcctccttttcaacaaatacttatggagcaccaactcaatagtgtgccaagcactaygtctagcacacctcccctggacaggcaggtagaccaaggaggtgctacagttcttgccatggtgtgcattaggccgtggctaagccatggactgaagcccagagtaaacacatacagttttgtaggctgtgaaatgtgcaagtccagggaacatcatcctatagactaagctatgaacaactccctcttcarctgtgtagttttgggggccctaatgaaattcttacatttgcagctgcgattcttgaaacccatgaaataattgcctaatttccaggtcagtacattttatgaagctaggttccctaatccaatagagcaatctaataagaaaggaggtgaagatgtgaagccagttgggtcagaagccaaagaaagcccatgcatgatgtaattgaagcaggtggaagaaagacaaggctgatgagatgttcaaccaagtttttaatgtggtttctatagcctcagaagaagacatcttagaagtagatacaaaagttaaccttgaaaggacattctgggtgtgggggttcaaaaatgagtaagtcacagttctttcccataggagtttagtgtctttattatcagcaaaggctagtttgggcaaaaagtagaaaaaaatattttctgtgatctgtatattaccstaaagcctctattttttctggaactcttgataaaaaccctaaatcttcaattactttcaaacgcttttatttttgattgcagtgcatatcccatttaaacatgactcagattaatgtggcacactcttccaagtgctcagagcacatcatatatactatatccctgaattcattcccaccaaatttttataatgaggttaaaaatcagccctggaacttcccaaaggaatactaggcagatttacaaatgaatcatccaacagatggtaagacttggatttttgcatgctttgcagacattggcatacttcaaggtagttatgcattaaaaaattttcacttaattttgggggaggcagtgtctgaattagtgaaagtataaattatagaaaatttttaaaaaatgctgtcttctacctctcaagtatccaacttacactaaccatgaagaaaatgtttgtcaagtgtatttcactgctaacagataagmttttgttctaattagtctactaaatgaatgctgttgaagttcttcaaaacagtctccctttaatcttttgtacatctttactctgctgaacagattcattctttttatgtatgacaaagagtaatggagacctttcctcttggaattgatggtctcactatatagtgatccactgcaccagatgaatttctaaatagactttgaaaattatctctgggctgtgcacatcagttggacaaggacagatgtaatgctttgctttgaagcaggttgagtcccattcttgcttctaactctttaggcttgggttatgcattgcttattgtgataactagctgtttgaatacaaatgttagtcttattcttgattctttctgctgacagctcaagtaaatggtgcccaaatagatgatgaataaaatctagagtaacacacataccttgccttgtgaaaattaacaagctctttatgagtttttttgcactccagaatgattaaactagggataaatctaaaatgaaacttcaaataaaatctgaagaactagggaaagaaaataccatcctaaagacttagaagaaaggtaggcttttgaatatagaagcccaaagaaaaatgcaaatcctactttgcattcccccaaagaaatgagaagatgtagccctggtaagatagcagcagaaagacataagaagagaaacaggtgtttttagagttagagataaataaaaatatgtgacataggaattaaaataaaatcctcactgaaatataaaaattacagcaacaaaattttaatcaatgattagaagttaaatttgaaaacactgtcttggaaaatagatgaaaattgraaatgatgagaaaaggtagtaggaggtcagaaaagaaagaaccaacataaataaatgaatcstatgtatgctgagagaaaagttggaaaagaagcaacaaagaaaaaattgaaggcagcttgcctgaacagaagaaagtaagacctgggtttgcagattaaaagggctccctgtgttcaatagaaataattttttttagtaaaatcccccccccaatttcatatatactagcaacatttttgaattacaaagataaagaaaaatgtttgcctgcaaagaaaaaaaacctatcagactttattcctaattctcttctacagcatgcaaatagcataagacagctgagaaatatgttgaatttaatgaaaattcaataaatctatacctaagttgttgttcttgtgtatctcattagccaccatgccattcttggaaagaattcaaggatatacttcagccaattgaaacaggaatcaaaataaattctgtagaactgtgctgtcctgcataatgtggctattaagcacttgaaatgtggctagtcctaactgagacgtgctgtaagtgtaaaatacacaatggattttgagaaaaagtaaaataatataaaaattccattaatattgtttgtattgattatatgttaaaatgaccagatttttgatttattggcttaaagttgttaaaattatttatgtttgtcttcacttcaatgaatgtagctgctagacaatttaaaattacgtatgcaacttgcatctgttccattgaacagtgttgctctagattataaattgttacgttaaagaagtattgagcaccaaaaccaggtaaatgtatctttaagtccaaatatttattggacataaaattagaaaacagaatgttatgtgaaataccatcataattcttaacagtgatacatcttaatattaaaataacaatttagcaaaatatctaaaaattcacataatattagtaaaagtgagtagagggaaagaaagagatgggaaaggtaatctcatcacctcagacacataggagtaagtggacactattaagttattgatgttgataaaaatataagagaaacataatataagaatatataattttaagtttaaagataactatcagccaggcatggctgcatacacctgtaatcccagctacttgagagactgaggcaggagtattgcttgagcccaggagttggaggcccgcctgggtgacatagtgagaccttgtctctraaaataaaagaaagagagagagaaagagaaagagagagaaggaaagaaagaagaaaagaaaattataatagtttcccaatctggattaaaacacattacagctatatattgtttcaagaggaaaaactaaaaccaaaaatgataggcaagaatgtttcaggtaattacaaataaaaaggagctagctctggtaggatcaactttctaaaaagcagaattcaaggaacaaattgcaaaatgagtaattttctatygatgarggagggatgccgtccacaatgaagatgtgaaaatgctacaccttattccagccataggatagatcttgcgtgctatgctagatatggtccttttctttaaattagtgcccatgaaatagttacaaaaattcccatgagttagatgacaaaaaatcagattagattaaatcaagattagattatgtaggacatactctctgactatactgttacaaagttaccatattatagtcatataatatgtaatattattacattaattaattacatattatgtaactatccatataatgactatattgttacctagaaaataaaaaaggtaaagaaaggaagaagacaagtttaagcgacaccaccactaaaaacaactactgggaatatgttttcaaaaatagacaacttctgggaaataaacattgccattgctgtcttcttagaagttgacatgtcaaacgggtgacatgtagccaaaaccatagatagaaattctctgatttaaaaaacaaattagggccgggcgcggtggctcacgcctgtaatcccagcactttgggaggccgaggcgggtggatcatgaggtcaggagatcgagaccatcctggctaataaggtgaaaccccgtctctactaaaaatacaaaaaattagccgggcgcggtggcgggcgcctgtagtcccagctactcgggaggctgaggcaggagaatggcgtgaacccgggaggcggagcttgcagtgagccgagattgcgccactgcagtccgcagtcgggcctgggcgacagagcgagactccgtctcaaaaaaaaaaaaaaaaaaaaaaaaaacaaaaaaacaaattagggaaaaaagtggaagactaatctattgaaagtaggggaatgaaaatatcaaatctaaaagcaaagacgaattagaaatgggaaagtagcagagtttctaagttcaagaactaccactttaaaaaggcaatgaaattaacaaatctctagactagcacggtccagtgaaacttgctgtaatgttggaaaattctgttggtgctatgcaatacagcagctactagtcatgtgtctattgaacattgaaatgtgctagtgagactaaagaagtggatttttgattttattaaattttagttattccaaatttaaattgccrcatgtgactaatggccatcatgttggaaagaagagctctagaaagtagacagagaagaaaataagcaaataaatactcaaaamtattaatatgtagatgaagattaaaacagaagatgcaaataaatttatgcaaacaaatttgaatatctctgcaaaatggcaattgtaaaggaaaatattccaaaagaaataggtaagatgaatgcagcaaaaacaaagacttttaaaaatttgtgaaataattactttgctaaaattaatttggattccaagagttttataggcaattttattcaaatattggggaatagactattcccaggataaaaacaacgtaaaagaagaaactaaaggctagaatggaaaccaaaggtgaagaatagaattactggcactgcaaatctgtaagtatattctagtaacaatataacgtgaccaaatagaacctatctgagtaatgcaagttggctttactattaattttttttttttttttttttttttctgagacagagttttgctcttgttgcccaggctggagtgcaatggcactatctcagctcacatcaacctcagcctcccgggttcaagcgattctcctgcattaagaagttgtttttttttttcttttttttgtggggggacagagtttcgctcttgttgcccaggctggagtgcaatggtgcgatctcgactcaccacaacctctgcctcccgggttcaagagcttatcctgcctcagcctcctgagtagctgggattataggcatgcgccactacgcccagctaattttgtatttttagtagagatggggtttctccacgttggtcaggctgctctcgaactcctgacctcaggtgatccacccacctcagcctcccaaagtgttgggattacaggcatgagccacagtgcccggccaagaagttgtttattttattttattttattttttattatactttaagttttagggtacatgtgcacaacgtgcaggtttacatatgtatacatgtgccatgttggtgtgctgcacccattaactcttcatttaacattaggtatatctcctaatgctatccctacccctacccctaccccacaacaggccccagtgtgtgatgttccccttcctgtgtccatgtgttctcattgttcaattctcacctatgagtgagaacatgcagtatttggttttttgtccttgcaatagtttgctgagaatgatggtttccagcttcatcatgtccctacaaaggacatgaactcatccttttttatggctgcatagtattccayggtgtatatgtgccrcattttcttaatccagtctatcattgttggacatttgggttggttccaagtctttgctattgtgaatagtgatgcaataaacatacgtgtgtgcatgtgtctttatagcagcatgttttataatcctttgggtatatacccagtaatgggatggctgggtcaaatggtatttctagttctagatccctgaggaattgccacactgacttccacaatggttgaactagttkacagtcccaccaacagtgtaaaagtgttcctatttctccacatcctctccagcaccagttgtttcctgactttttaatgatcgccattctaactggtgtgagrtggtatctcattgtrgttttgacttgcatttctctgatggccagtgatgatgagcattttttcatgtgtcttttggctgcataaatgtcttctattgagaagtgtctgttcatatcctttgcccactttttgatggggttgtttttttcttgtaaatttgtttgagttcattgtagattctggatattagccctttgtcagatgagtaggttgggaaaattttctcccattttgtaggttgcctgttcactctgatggtagtttcttttgctgtgcagaagctctttagtttaattagatcctatttgtcaattttgtcttttgttgccattgcttttggtgttttagacatgaagtccttgcccatgcctatgtcctcaatggtattgcctaggttttcttctagggcttttatggttttaggtctaacrtttaagtcttwaatccatcttgaattaatttttgtataaggtgtaaggaagggatccagttttagctttctacatatggctagcccgttttcccagcaccatttattaaatagggaatcctttccccatttcttgtttttgtcaggtttgtcaaagatcagatggttgtagatatgcggcattatttctgagggctctgttctgttccatttgtctatatctctgttttggtaccagtaccatgctgttttggttactgtagccttgtagtatagtttgaagtcaggtagcgtgatgcctccagctttgttcttttggcttaggattgacttggcaatgcgggctcttttttggttccacctgaagtttaaagtagttttttccaattctgtgaagaaagtcattggtagctttatggggatggcattgaatctataaattaccttgggcagtatggccattttcatgatattgattcttcctatccatgagcatggaatgttcttycatttgtttgtatcctcttttatttcattgagcagtggtttgtagttctgcttgaagaggtccttcatgtcccttataagttggattcctaggtattttattctctttgaagcaattgtgaatgggaattcactcacgatttggctctctgtttgtctgttattggtgtataagaatgcttgtaatttttgcacattgattttgtatcctgatacttggctgaagttgcctattggcttaaggagattttgggctgagacgatggggttttctagatatacaatcttgtcatctgcaaacagggacaatttgacttcctcttttcctaattgaataccctttatttccttctcctgcctgattgccctggccagaacttccagcactatgttgaataggagtggtgagagagggcatccctgtcttgtgccagttttcaaagggaatgcttccagtttttgcccattcagtatgatattgcctgtggktttatcatagacagctcttattattttgagatacrtcccatcaatacctaatttattgagagtttttagcatgaagggttgttgaatttcgtcaaaggtcttttctgcatctattgagataaccaygtggtttttatcattggttctgtttatgtgctggattacgtttattgatttgcgtatgttgaaccagccttgcatcccagggatgaagcccacttgaycatggtggataagctttttgatgtgctgctggattcggtttgccagtattttattgaggatttttgcatcgatgttcatcaaggatattggtctaaaattctctttktttgttgtgtctctgccaggctttggtatcaggataatgctggcttcataaaatgagttgggaaggattcctctttttctattgattggaatagtttcagaaggaatggtaccagctcctccttgtacctctggtagaattcggctgtgaatccatctggtcctggaatttttttggttggtaagctattaattattgcctcaacttcagagcctgttattggtctattcagagattcaacttcttcctggtttagtcttgggagtgtgtatatgtccaggaatttatccatttcttctagattttctagtttatttgtgtagaggtgtttatagtattctctgatggtagtttgtatttctgtgggattggtggtgatatcccctgtatcattttttattgcatctatttgatttttctctcttttcttctttattagtcttgctagcggtctatcaatgttgttgatcttttcaaaaaaccagctcctggattcattgattttttgaaggattttttgtgtctctatttccttcagttctgctctgatcttagttatttcttgccttctgctagcttttgaatatstttgctcttgcttttctagttcttttaattgtgatgttagggtgtcaattttagatctttcctgctttctcttgtgggcatttagtgctataaatttccctctacacactgctttgaatgtgtcccagagattctggtatgttgtgtctttgttctcgttggtttcaaagaacatctttatttctgccttcatttcgttatgtacccagtagtcattcaggagcaggttgttcagtttccatgtaggtgagcagttttgagtgagtttcttaattctgagttctagtttgattgcactgtggtttgaagagagagtttgttataatttctgttcttttacatttgctgaggagtgctttacttccaactatgtggtcagttttggaataagtgcagtgtggtgctgagaagaatgtatattctgttgatttggggtggagagttctgtagatgtctattaggtccgcttggtgcagagatgagttcagttcctggatatccttgttaactttctgtctcgttgatctgtctaatgttgacagtggggtgttaaagtctcccrttattattgtgtgggagtctaagtctctttgtatgtctttaaggacttgctttatgaatctgggtgctcctgtattgggtgcatataagtttttaatatatgatccagatatcatgtagactttccctttaagacctatacaagattgtttcaaatcttcatttcacatccagtttcaatccttaaagtttctgtgacagttttaggggtttcccctcattacttccagctattattttctgagtctgttgaattatttcctacactttgtgtctcgcagataacaaaagatgggacacagtccattcttcrtaatttctaaatcctctctcccatgtaactttcagaaagcagcagtgtgtgagacttttatgattccagaaagccagttatattacaattccacatagcatttaacttaaacacaaatgccagaggtatatgtttttggaaaattctgcacttatatctgccaagtgtcttacgccatttgtgttgctataataaaatacctgagactgggtaatttataaaaaacagaaatttatttctcacagttctggagaatgaatatccaagatcaaggtgctggcagattcagtgtctggtgagggcctgatttctgcttccaagatgatgactggttgctgtgtcctctgagaggaggagcgctgtgtcctcacatgatggaagggacaaaagggaaccagagtccttccgtgaatccctcatgacccaatcacctcccaaaggccacacctcttaatactattatactggggatttaggaaaacaggttaatctaacaagataacttagaaataaatcctaatgtctttgggaatttagaatgtatcatcacagatcaaattttattcttatattttgttgagggagtccttttccccacccctgatgtgtatgataaggagttaaattttcaaatctttttgcaattgcaggagacagaattccggaaaagttcctaaaaccagtaactactatattgaaaataacaaaacagtatctaggtgactgatttaagatattcaaaacattattggtactttattttttgtaccatcattattgttttgttttagtgagcataaagttcttcatctgggctttactccattcattcctaattcttatgtatcccagccccaaatttcctacccactgagaattttaggagttttatttctccaaaggagaggaaggctacaaccctatgtcacagatattttgagaaccgttgaaggttttcagtaatgttttttccttccctttacagagaactatgtctctttctttccctgtgcttctcaggactctaaattttcagctttctgccagcataatctttgagtattcttatacagaactgagttgatgagtcacttgtcagatttaaatgggattaccacatcaccttgggctccttttactagcagtttatcaagctgccactcttaggcacaccacaaaatgaatctgtagttatttctgatttagattcttcttatctcattttcttgctttcttgtcttttctcagcccattaaattcacctggcattatttatcctcccctgcagcctgagcttcctttgttaaaggaagctgcaaactgctgcatgcaagacrgtaagtcaggcctgtaatgccagcactttggtaggccgaggcaggcggatcacgaggtcaggagtttgagaccagcctggccaacrtggtgaaacgccgtctctactaaaaatacaaaaattagctgggcatggtggcggacgtctgtagtctcagctgctcaggaggctgargcaggagaaatcgcttgaacctgggaggtggaggttgcagtgagctgagatcacgccactgcactccggcctgggtgacagagtgagactccaaaaaaaaaaaaaaaaagactaagtcaggactcttcctagttgcgataaggcaaatcctgtttcctatgtaaaaaattgtctgtttcctattcagaaatgcaggatgttctgcgtgatctacactaagcatctgtttacttgctctgtaataaagtaatraacacagtgtgatgtatcacacagagccttggattaggagaatgagaattttgggtcaaagtaatgttttctaactctgtaatctaggttatttgatttcttggagtcttagtgtcccagtgttcagtagtttccataatacttactttgaagggctgatgattcagtaggctaacacaggtggagcccagcacacagcaagtactgaacaaatgtttgctacatctgaatctgagcccctgctctcttgatgagctcagtggtacagatgctgccagtcaggaggatttataaccartccggagggtttatgggtccatgaaaagttgtctttgtgaagagaacggagaggatttatggcagggacagaggggaggtaagaggaaaggagaatgtaataggcattgaatgagagtcaggaacaagtcaaaggagagaggaaagagaaggttggggaggggagtgaggagaagctgatgagatggagtgggttgaagggagatgctcacctcctgcacctgagctgcattatttttggtgccctgaaggcttagtttacctaagatttccctcatggggtttttgatattattgagaaagacctgtgtgaatctatctgtttgtgtatttttggctctatttagtcagaaacatttcatgctttcaacatcagcttaaaataaatcagagmaggggagtttttatttttcattttgtcagagcagacmtttccagtgcccctggagagtcttctgcccacatttgtggagagtcagaggaagggttcttttccactctctcagagttcacagaggagagtacttactccaaaagactcaccagattgagttgagatgagccatggcagaggcccatggtgatccttctaaggcaggaatgagtagcagattagattctgkctgtattttctagcacagaaaagctgtgtggataccctgtatcctgggcacctctttggcctggcttcacctcctcttggtcctatttttaagctccggcttaatttctcttcatttccacccagattatgtgggaattgccccatacttatgtgtgggtagaccccaaagggctagaaaattaattccctgtggagttacctttgaccatgggggatgagagcctgcagataaatgctccctcttcaattcctcagggggataattctgagcatgctccccaccttctctgtgatccctgtagaacccagcccaggtaccctgtcttggtagggtttattattaaatacagtaaggccaacagatcaggaggtgactgacattgaaaagatagtgtgttacacgcacagattccaagagaaggggcacatcataccatgtgggccatacagggaagcactggggctggtcactgggcagaggggggatcaggctgctgtaggcaagagcctcagtgtggttcaggaagcagtgagcgaggcagggtaagctgatttaggattggctagttggataatgtcagtggtcttggggtaattaaggcccatggatagtggccaggaacacaaaagctctataagggcggtggttgggggtgcagactctgggtcggttggtttgtatttgaaaggcacacccctgagaggaggactgctgcctgaggaggtgcaggggcaaggtgactcagacatattattattgggttgcctggaaccaggcatgtctggcatatgcgcatagggcagatgttacagctcaagtttacagatgctagaaacatggtgaatacacccacgggatgacgacttgacattgcacctgtgtcttggttttcccttgttactccctaatttactctccctgttctcctctcctgcctcctggaatcacttccaaaagaaaaaacttgccacaagcccttgtctcagaatctactttccagaaagaaacttggtcaagaccttatgttggacgcagttcagcatgggctgagcaaggccttttttctccgcacacggcagtgttctttgttcgtctttcttagagtgtttcctgtgacatgttttttacttaaaattgttaatattattattactcaccttttgccttaaagtttttttactttttgaaaaatagtctatcatttatgaattcattcagcaaacatctcttcagagcctgctgaatatgtaatcatgagttcacactgatagttctagttcaaatctaacacaacaggcttctttaccttctcctactgtctgtttgtattttctgtctcctggaataagagctgtggttcccaacaccctcattatggctgcttatttgctctgtcctacagtatatgtgatatagtttagaactgctcctttatgattatcaacaacagcaaacctactcagggaggttcaagatttctctgctgtgtgtgtgtgagtacrtgtgtgtgcatatttagarttgatctctctaatgatatacagtagggatactgtattcataaaatatttaaattaatcattattttscattataattatgttactaatatcacatacagttaggttcatttctgtttctattcaattttaggatttgtaaatttttttgttaactatatatttgaatattaaaacatttacattattcaaaagtaaaaactatatacaaatgtgaagtctttcatctccaacctgtcttacttattcccaactcatcctttgtgggtaattttcattgtttctggtcctgtcttctttgtcttttgcaaaaataaacaaatatatttccccttgtttcttattcaagagggagcataatataaatagactcatgcggtttttttttcacttataatggatcttggaaatcactccttatcagcttatagagatctttcgctttgggatattagtcagtggcatagcaatccattacataaatgtactatagttaattcagatgtagttaggctaactacaagagacttctcaaaggggagcagcatgaggactttggtactgttaaaggataattttttgaaaattcatacaagtacaaagtgaacatgtgtcaaagatcttattcaacacattgatgaataaaccagtaagatgtaacaactagtttggaagaaaatccaaagagcagaaaaatatgtaaatccatcaggtgtgctgaaatttacttaatggatgtgaaatggcaagacttatcaatatctacagggccataattaattgcattccatgggacacaatttacatttctatggacaagattcatttgtgttgctatcagttttctccaatttacagtattgtaaagtagttccaagatagtgaaaagtgaagacaattcagatgggtgagatagataggacgctcatgaaagtttttggtcaatttcaaacacttcgatggattggaaaattgtttatggaggggattaaggagagggctagggaaaacgaattcagttttccaaagactggctctagtctaaatcaattagcagctgccttgtgtttttctgcctcttcaaagcttcttgagtgcagagatggtagagttttattttaagaaactgtcacagctaccccaacctttagcaacaccaccctgatcagtcagcagccatcaacgctgaggcaagattctccaccagcaaaaagattacctctgcttgaaggctcagatgattgttagcattttttatttcagcaataaagcattttagagttaagatatgtatattgtgtttttagacaaaacgctattacacacttaatagactacagtgtaaacataatttttatatgcattggggaaaccaaaaaaatgtgtgtgactcattatattgtgatacttgctttattgcagtggtctggaactgtgaacctatgatatctcctatgtatgcctgtatattgttttctagcctttttagaagatgaaggcaagtgagaggggagttgagagtgagtrttgagtgaatcctagtcatctcttcaaccacagttttcttttaaactcatgaatgtgtatctttgtgggggctggtactttggaggtatcacattttcatttgggagcccttaatgtagaggtggcttgggtctcatgatccttctgattcattgactgagaaaacggtgaaaaagctcttatgaattcattaatagttttagatgaatttgtagttttattartcacatctatatatatttaaatattagttacatatttatgggtaagatgtaatttcacccacagttaaatgcatggcaccctatggattcaggagctcttcctacgagcctgccattcctcataagtcactactccacagcacaccagtctcctttctgaaatacaggtacagctgtgtcaccacaaccttgctcaaaaatctttcktttctttttttttctttttattgcttggaggataaattcttaaatgagtagcattttattcaaggcactttgcaaatggcccaaccagcctctgacccgatctctggacactgcccctgtggcttcgtcccagcctcaggagctgctttgttacgcctctgagcctttgtatatgctgtctgcactgattgttttcccctcctttccaccggctgaagagcgtctcatgctttagaccatatccgatgtcatgttctctctgtggttttccccagggtcccgaggcagagtgggtgagctctcctctgggtcccatagccctctatttgcccctcagttatggtgcattgccagtttattatgattgcttgtgggttcccttgggaaccagtctcattcatctttccatttctagggcgaagaatgaaacctggcacattgagggaattcaatatgtgtttactgaatgaaaaaaatgaaggaataaagggggatgtgcaggaacttttttgtaaggccttcatttagatcaggtttaagaaaacaggctgctgttcttgttcttcttcccagaaccagaccttcattaacatagaactgatcttcattaatgcagaaccagacttcattaataggaccakatcttattaagatatatgtgtagggcccttaaaaaacaaaaaaagctgtcttgtctttcaggggtttgaggaatctgtttccttccactgatgtactttaattttctcttgatagacacaagcagtttggatggacaccccaagggaggtcagttatggcacrggcattgaaagagctgtttgctgacccatgggtgtccttgcttgtaggctcaggaatccatgtgaggaactccctcttgtgtgtgaggttctttcagtcttcctggcagagctgtccttctggcacaacaagccagggtgatttcttctatggtgggctgcaggtggctggccaaggtctcagggaggaattctcatgtgcacacaaatccattttctatctgcctatcccatgtgcatggtgtgtgttagctagcactgcttctcactccttcatgcccatccctcatgccccataaggaggctttgtgtgaattagaaaaatgcagtattttgcatagacacagctctatggtgcatggcttagtgatctgacagtgttttttttttaatttttaatttttatttattgttattttattctatttttattttactttaagttctgctatacatgtacagaatatgcaggtttgttacataggtatacgtgtaccatggtggtttgctgcacatattgacccgtcctgtaagctccctcccctaaaccccacccctcaacaggctctggtgtgtgttgttctcctccctatgtccatgtgttctcactgttcaactcctactcatgaatgagaagatgcagtgtttggttttctgttcctgggttagtttgctgaggatgatagcttccggcttcacccatgtccctgcaaaggacatgacctcattctcatttttatggctgcatagtattccatggtgtatatatgctacattttctttatccagtctatcggtgatgggcatttgggttggctccatgtctttgctattgtaaatagtgctgcaataaacatatgtgtgcatgtgtctatatagtagaatgatttatattcctttgggtatatacccagcaatgggattgctgggtcaaatggtatatttctgtttgtagatccttgaggaatcgccacatcgtcttccacaatggttgaactaatttacactccaaccaacagtgtaaaagtgttcctatttctccacagcctcgccagaatctatttcttcttgcctttttttttttttttttttttttaaagatggagttttgctcttgttgcccaggctggagtgcaatggcaccatctcggctcactgcaacctctgcatcctgggttcaagcgattctcctgcctcagactcccaagtagctgggattacagccatgcaccaccatgcccggctaattttgtatttttagtagagatggggtttctccatgttggtcaggctggtcttgaactcctgacctcaggtgatccaccagccttggcctcccaaggtggtgggattacaggcgtgagccaccatgcctgactgcttcttgactttttaataattgccgttctgactggcatgagatggtatctcattgtggttttgatttgcatttctctaatgatcagtggtgtagagctttttttcatatgtttggtggccatgtaagtgtcttctttggagaagtgtctgttcatatcctttgcccattttttgatggtgttgtttgtttttttctcgtaaatttgtttaagttccttgtaaattctggatattagacctttgtcagatgagtagattgcaaaaatgttctcccattctataggttgcctgttcactcaacctgacagtgtctttgtgcaaagacaaaatttttcttttatctgggtagacataaccagaacaagccaacggcaattggttaatggtaatggtaatgtcttcaggctctacttaaaaaattttttgctcatagacttttaaaataatagttatttaattaattatatatgatttatttatgatttttatttacttttatttttatgaattttattttagaacaattttagatttacagaaaaattacaaagataatatagagatctcatacggcctacacgcagtttcctgtattattaacctcttaccttagcatggtacatctgttccacaatcccatctaggatgccacrttacatttagtcatcatatctttaggctcctcttggctgtgacagtttttcagactttccttataygctagtccctctatttccaagggaattggttacctcaggtaacaaaatgcacagaggttcaagtgcctgatataaaatgatgtagtattgtcatataatttatgcacatcctcccatatactttaaatcacttctagataacttgtaatacctaatacaatgtaaatgttaaataaatagttattgtattatttagggaataatataataataacattaagtaaaataataatttcaataacaattttaataatttaattttgttaaaataataaaattttattaaaatattaattttaataatttaattttaataataataagtaaaataataatattaagtaaatagttattgtattatttagggaataatgacaaaaaaagtctgtgcatgtttactacagattttttttttctgaatattttccttctttagttgtttgaatccatggaacccatggatatggaggctcagcagtatttggtacctttgactgttttgaagagcacgggtcaggtgttctgtcgcaggttcttcaagtggtttatctaatgttttctccatggctagattgggtgttttagactgattatttaataagttttattactgtttaggtatggtaaggtcaacagataaggagacaaatgccattgtaaagataatttattacccacagttcccaggagagggcttccatgtcatgttacggggccatctggggaagcactggtgtcagtcaggaggtggggtgggacattgtgggcaggaacctttgttgtggtttctgcaagaaggaacaggcaaggcagggtaggcagggttgggactggctagtttgaatgacttcagggggctggagcctaggggctgcctaatacctagttgcctggtaccaggccctggggtgattaggcccagtggagagtggtcaggggtgagaaagtcctataagggaggtagatggggtgtggactctggattggctggtttttgttttaaaagcacacccctggaaggaggacttcycctgaggagttgggggttgggggagagtggggcgacaagggaggcaggaggccaaggtcaggtgactcaggcatactattgggttgtccagaactagctgtgttgggcacatgcatgtagggcagatgttacagcatgaagtttgtggaagctagaaacatgcctaatacacaaagcaaaagtgacattttcatgacatcatatcaagggcacacactatcaacacaacttctcactgttgagtttgatcttgatcacctggcagatcaggctctacttttgtagacaccgcttccacttgatgcccacctttaatatttatctcacgtgtttgaagttttacatgcataaactacatgtaattttcctgggtcttgatatggtgagttctagttcttaaaggtggtgccctctttggggtgggtgtctccatagaatggagtcttgggcttcagcaagctgaatttataggggagacttgtatttgaacatcctcacagttccctaaaatggtagtgctttatatatttccaactgctgaataaacatctacatagatacctgtggctctgtcaggagtttgggctgatcaccactgcaatgagacaagatatatccaataacttagctttgtgtcaaaatactcagagtggtagcctattttctgcatataaatgtaaaaattcctggttacaactctgtaatgttggcggagatggtgagaaatatataaatttccctgctctgctttggaagatcctgagttggggaaggcaggacatggagtcaactggtggatgattcacctgcatctctcttttccccatgcctcagggtctaagtcacagaactgtctgtggaactccctcatcgatgggctcacagggaatgtcaaggagaagccaaggccaacaattgtccatgaccctcgacccccagaggaratcctagctgatgaattgccacagctggatagcycagaagtcttggtgaagacatccttcaggtttggtggattgcaactcartgtgttccttcttattygcttgtggagttgtttcaatccagttagatgcatagtcagtgtggccagcaaattacttcatttctttgcactgartaaattaaaattgatgaaggagggttggaatcaatgctagctggacttctggctgkatttcctgaatgtagtgaagatcttatcagtagytaagttgctgttggtatttaattggtattggcatttaaatgctgaggtagaggatttactgatgttggcaatttgaattggattaatgagtcttttgcttcaaaggaggatgacacatccagataagggcatagagaaaaagcacgtgttgggaattaattcagccctgtgtatttagagtctcttgctgggggaaggtttccagttgtaaaagatgtaagagctgctgctgacggaaatgaagcaagaattttctcatgttgtttcccaggtggctgtttactctattctagttcattgtttagtcttgcatcttcctgcaaggtctcttattttctttcggcattgcactccattttcattacaactccatcccttgccttctcacccatattaaataaaaatcaatctgggtatgagtgtggtgtaaaaacgtgatttttttttccccaaatgggtctttcagactcacatttgaaacagtatatttacagtactactggtatcagaaattaagactcaatcatttttccagattgccttctgcccctcctttcttcctgttatgtcaattttacttcttccacttttctttccactatagactttcatactctccacatggttagcagaacatataaacctcgtttttctctccccataaacaattcagacagctgttggagttccatgaaatatatttgaaaaatatactctcttttgtatccaggtgatatgtgtaattgctcagtgagagccatttcattgtgtgaagattcttagtgttgattgaattacagatgagttctgaaaggagtgctaaataggggtttggatttctttatacagtgtgacgagtacattagtgagacaagaattgcaggtaaatgctgtttttattcctactaagggcttggttattgcatcataaggttttgaataaaataaaacccactcacctgagagaatacgtcttatgaacctgcaattctcagcaagtgactgtggtgaaagaggggaccatgaatggctttctctgtctatgtgttctcaccttggagcatttcttatggagtcaatcccttctcctaaggtttcttataactactccttccaccctaaaccagggtcatcattttcttcaatgaacaggcaaagagttactctcatgaaaataacrtcttatttgctcaccgaactccattaccatcatctgttttgtttgcattctcttggtgctctttaatagagagctcatgagctttaatattgatgcccatgaatgtcatttggtctgttagttgtaacgtgtagcagtgtcttggtttctgaaagagattaagttataaattgaatatcaggacttatttctgtttccttgtaacacttggtgctgtaggaaaaagacagcaggtgcatgcaggtatatgccaaccctttagcaattgagacaagaaatccattagcatttatttatttatttatttattggtacccttaatacaactgtgtactattttgtaactatcctttcttccaaagaagatggttgattttgatgacagtgctaaatggtaaatattctcttctgcaattgtccttaactgtggtggcatgatcagctgtgagatttgttgtgcataaattactacaagtaaagtactcaggtatgggaagagtttatttatcaatgaataaatcagagcataatcaaggttaccctacagctcctctgtagggtcattaccattgagtggtaccacaataagggttaatgatagctttgattacttcgttctctttttccttggtcacgcttggagggcatttggagtttagggccatgaaatatggtcatcacctcttaccaaacaagatacaaatgacaatgtcaataagcccaatgtgccaaattatcaggaggtccagtcttttcttggggttcttgtccctcactattcmcagggacccccagccttattgacaggctgggttcaagaatcatcgcttatcctgttatgccttttgtcccctactagggaaatgaggtctcatgttgagcatgtactttctgacctcagtgaaattaggcatttttatcaccagcttagattacctcttccttgtgatgactcctctctgtggcttctgttgtcttttcctgatacttggcctcagcacaaccacaatttttctcagacatattctaataatgttgattctcaaaaggaaggggttagatacttaattccacttttcccggaaatcttttctagctctctgcaaggtggaggcaaatatatacaagctactaccaggacaaaatgtgtgcacttgtttaatatttgcatttagtattttcatttaagtagttcttttcagagcaaagggacagtctgctctaaagctaaattctactttctgtttccaaagatacgaagtgtttataaatttatcaatgatgggtgtttttcaaaaaaatttcaaatatttttatgtttcagtctccaccaggctccctgttacatcagcaatagccgttcttatttgccaggcttaacccaaaaaactcaaggattctgtccattttagagatgaagaaactggcttggagagagaaagcctataaaaaattgctggtagattgctggtctccaatgcagcagcaaggagtagcttgggcagactttaagtcttactttatcaccccaccccaaataagtatatcatctataaactcacataaaaagcatgcttgtgattcaaatgcagcktcaagacatgtccctgggccttgtcttccaatcaggctgccatccctaagtatggcctgcaaacactctggattgtcactggattaatgtcagttrctaataatgccagagggtatagctgaaagtgagaatttgacacactgacttagaaataaagattttggaaaatgaaggcaccacctttcttccctaggggttgtgtgtcgatagttgaggtttgtgcaaacaccatctcaactctggatatggtccctgacagtcttccctcttatccccttcctggttgggcagtgctgatgaggcatactctatgtattggagcagacagtttagcagagtcttgggagcatgcttccagggcttgaggtctcctcatggctgcccaggtccagatcccagccaatattgctggaaggcaacacagtttagtgctcagttgtaccaagggctttagtctttactctccaagaaacaaacattttaagctatccaggtgcgaaaattggacttctgatagtggttgtactgggtttcagttccaactctattgcccccggcgaattacttcatttcttcaaacctctgtttttctctcccccaccacccaactccccagctttataaaggtataattgacaaataaaattttacaatgtaaaataatatgatgttttgttgcatgtgtacattgcaaaatgattaaatcaagctaaataacatatccaccgcttcacataatgtctttttttttttttggtggcaaaacctctgttttcttaactgtcatactgaggttggatttgaagagtggtctgatgattcaaacttgagtgtgcatcacaatcacccggggggattgttaaaacagattgttgggctcatcccagatctaggtggggcccaaggatgttgttctctaacaagcttcaggttatactgatgctgctggtccaggatcacacctggagaaccactgcactagatgagatttaggatccctttgaactcgagagtattttgctatgttaatttgagcaggtcacttacctattgatatggtttgggtctgtgtccccacccaaatctcatcttgaattgtaatcccatgtgtcaagggaagaatctgatgggaggtaactggcttttgggggcatttcccccatgctgttcttgtgatagtgagtgagttctcacaagatctgatggtttcataagcttctggcatttcccctgcttactcttctctttcctgctgctatgtgaagaaggtccttacttcctcttcaccttctgccatggttgtaagtttcctgaggcctccctagccatgtggaactgtgagtcaattaaacctctttcctttataaattacccagtttcaggtatttctttatagcagtgtgagaacaaacttactcacctgttctggcctgttttaaaatctttgaaatggggataaagagacccccttcctggggtttggagaggatttaaaggagataacgcatgtgaatgagccaagcacagtgtccagtacccagaatgagctcagtaagtattaattttgtattcgtgctcagcactcactggaatccttacatgcccttgaagcctacacatacaaagttaaataggatcaaacatgggttttgtggctccacgtgcagacactgtgggccctgaaagctcactaaacttgtggcatgaaaggtctgttttcaaaacctgagatttttgaaaagaagaaagtgggaaccacaaataaagaaaaaggctttggtacctggaaaatagacactcctgggaactcaccttgggtgcctctttccttgtttctcacattttatccctttaaacctgttgctctgctcaggtttttcttaaaagagaatagagaataaattgaacctggggctaaggaagacagacaagtccatccagtctgattagtgacaggaatctcaatacctgccactagaggacccaagagaacatgaaagagctggctgctgagagaggtttgtctccccagcctctggtgtacacattcccagaggtgggagggacctggctcagatggtaccacaagtaagagaagccaatatttattgagcatctgctatgtgccgaggactgtgcattcatttgctcatttaatcccctcaaaaggctggcaagttgagtattgttatcccagttgtacaggtcaggaaactgaggctcagagagatcaagcagcttgcccaaagtcacccagcaggtggcagagctggagatttcaaccaagtctacctagctctacagccatgctccttcagcatattctactagcaccacataaccttggacttcatgtctctagatttgttgttggtgaaaaaagatatggtgtgattggttatactaatttgagtgtgcactttggatatatagtttgagttatattttgatacatattttatatatcctataagactggccctattctattgcactaaatctttttctagtctagacttatgttttcaatccacctaccctttttggatagaagccattgaaggcactgcttctcaaaccttatgtctaaatgaattccttggggaatcctgttaaatgcagatcctgattcagtaggtctggggtgcagcctgtgaatctgcatttctaacaagctccaactgatgcaatagtctgaggaccaccaccttcagagtggtgagacatgggctttggaatcccacaagtatgaatttgcaaacaatcttttaaactacatgatttgagtaatgcttttgttctctttcctcatttttcacatgcaaacagtaaaataatgggctttgggggctgctgttaggattaagtgggccaaagaaggtgacagcctctaattctttctcacttcagtttttaaaaccctgtttgggagaagactgatcctctacacccccaactctttcttttgtgaytggattatgcagtgggccccagccagggaatatgagccctatggatgctttgtgagtgatgctggctgtgggcctgacctccttgggcagtggtggaaattctgaagccactcagtgcattgcccatctcagttcctttgctttgaatcatgcgactcccaacacaggttgagttgccaggttttgataattttgcacttggaagaatcatgtgcttactccctacagagtcagtgggggcttggtgagcttctcttcccacttaggatggacttatttgggctttggcaaaggctttctagattctatagatagcttactaagaatatgttccagagagcagaatcgcattgagccaacaccctcagctacggatgagattaaggccttgtcagatcccatttaatggattgtgttttccatgcagaattaaatcgttgaactcatcctcattttggcttttggcagtcatttttccactaggggctgctgccaaaatgtcagtttctgacttgattactttcaggaaatgtgcagtctggctgatgatatggcatggtgtggggtagcgtcccctggagcttcggccccgccctgggatgagtcatgggttaaaattcccaattagctcataggaagtctggtcacacatatttttctattactgagtgttgctcacccattggaaacttctggggacacctactctcctgacttagtgttgccttcctggagttatttttcacctttagtctttgcaaatccaaatcatttgccaaggggaaaaatgaaagaatgaattctgagaatttttaaagcctagagaagtttttattgcaaccttggcttcacataaaggcaatatttaggtctctctttgtaagtttttagagacagatcttccagtgttaaaaaatgaccaagtatatatgaggtagacaccattcctcttgcattcttgttggtcctctcactggtagtttgggaagggagggcttatctctgtggtggccatgagaatatacctttcatatctctgatcacagaaagtgaacttgacgcatggcctcctagcttgtgtgtggggaaatttatccctgtgatggccaaagctgtgcatcccagaggaacccattggaacccattggcgatgactgagcatggcagggaccctaaggtcagctgttcctgggagacatggaactcctttgatggtgactttggtgttcagactcactaacggccttgctgaactttttttagagctgcagtacagtctcagacactgccacccaactttcttttactgggagtcagasctgcatccaggtctgatggctttctcagcctcgctcagctttttactcatttgtttttacagattttactccaatacatttcttgtatgtctaatcctgtcttgacatctgcttctaggaggaccacagtctcccatcacactgcagttctctgctggtgcatcacttctagcttggcacggggggcatagctccaatgctactggcctggatattctgggccagtctgtctatatttaattttatatttgatgcagtatcttccctatgggctctagtgggagggaacatggggcaagtcacaattttctttagtatcttgtmcttttattgccttacaggggattttgtggaagcattgagattaaagaaactacaacataaggataaaattgtaattatcctcaaaatatgattgttttcattgtccaagaaaggttcacaaatgttgaccttcatacagaaggtctgctgatggacacacctggctcctagccagtgggcttgtctctagggctgactccccctagagaatgcatcctttttccaaccagagcacattcttcttgggccgttgagaaatccaggcttccacccccaggaatgtagctcatctgaggtgtcctcaacccctcagcatatgcctcaaccacaataaattttagcagcacattttacaaagtgtgagttattcatcctagaataaccctcaggaagctttcagtgctgttgggttgggaggaggagcgggacactctttctggagcttccacctaactcaccctgccaatgtgaagtgtggataaacttctctatgtttcctaattagcaacaggaactgctgttccagcccacataaagacccaaaatatgcagggaatccctgaagttctctctaaataaaggaaggaagtgtgaagatttgagatcagcttggaccaaactacccctgggggtcagtatggggtgcgaggtaaatgcacttctcgtctccagttgcatgagcaataacttcattgtacacaacctgtagacttacagggaagagattttcaatagagtayttgatgtgtgaaggtagcaccaataagctatgagggtgggagcagtagagtagaggagattggcagtgagatcacgggtgtagcccaatgtcaaggatgctctgtgctctcttggatacctccacaactgggctgcccaacctcctatccgtgtgctgtctggacactaccactggcccatggtagcacatcccacattattcttattcatattttgcattagatacaaatttttctgggtggcagggacccactgcctggattgcctggtatatcatagatgcttcaggtgtatttgttgattgaatgaatgggttgtagttttgcagcccaattcattttttatggtttagctcacgaacctcctatgaaaaggatggtgtaattctaggagctgaaagtataaattcagtccatctcaggcattagagaaattcctggttgggagagacggcagcaagagtaatgctgttgaaaatgcattgcagactttggaagcctaaaatataggcagtggtttgcagaagtcagctagccaggggctttctcccatcatattccttcttccctccctccctccctttctctctcttttctttcctktttttagtttctttctttcaacagagtattgctctgtcacccaggctggagtgctgtggtgtgatctcagctcaccgtaacctctgcctcctgggttcaartgattctcgtgcctcagcctcacgcccagctaatttttgtatttttagtagagatggggtttcaccatgttggccaggctggtcttgaacttctggcctcaagtgatccacccacctcgacctcccagagtgccaggatcacaggcgtgagccaccacacctggcccagattcctttcttcactaaaatttcttgacttggcttattggaggatagagggtttattcttatgaattaatagggaattaagagttactatccagaaaatgtactttatagattgtcagccctaatgtgagaaatacccgtgtaacagggctgcaactttgtcaataccccaagatgtgtgagaaaatgttgcttcttaatttcctttttagttgaactagtcttcctctggagcccccactttaaggggaactagggagaaactctacatttaaagtcaaatatgaacttaccatttggatgatactttttttttctgatgatttagtttcttttggtaaaatgctcattggttcagaagtcccctctggcaccctgcagctcaccaagatggtgtctggtttgtgtggctctgctggcaggtgtgatctgactccccttcccgcctttatttccctcccagcccctttccactcctcctgtggctgtgctttaggccctgaggatggtctggttttgattcttatgtggttcagcatcagatggtccagcctttagcccgtggccactttgtccccatggcaacctccaggactatctctcagtcacaatcccaggtaacttctgagatttggcttcaggagcttgtgggagcctctggggcctgtccaaaccacaaagagcctacagacaacctggcaaagctaaaactcagcctccctttacctaactctactggccactgagttcactttggtgtagagcttccggtttttgggcggatawccctccagagagagaagaggacactcaggtctcacccttgcctcttctgctctggtttctcttctccctgtcatctcccctgccagaaaagctgcacctctgcctttctacttctcctcccttatagccccctcctccccagtaccaggcttggggctaagtcttaatggtggatgaagtaaagagacagattggcctactgatatgggactctacactgggaaatatctcaaaaacaccatatgtcaccccttacaactttccatgatgaatgactttaactgcrtttgtttgttgcagtgaaattaaggtaccctaaataaaaataaagcagacccctttaaaactgtgccctgtaataaggcaaatctgtatatcccttgattggtgtgattgattcattaccttatgataatttaaccctgtgttttactctgtagaaatatttgttcctatttacagcattagggcagggattttgaccttgctagaggaaaatgatccttttccttcttattaaaatttctctgataacaaatgctctcttcccattcatgtgctcagtgcatactctacaattacatcctgtgttgggcactgaagctgcatgaggtgagtcagaccactgcaggccccatttgtcctcccccaccctctccccgtctcccagacctcacagagatcgatgcatatattgaatggcactatggtataaccataaaacagatcaccctggattatggtggacataaaagggaagcaaaaggaacagtttgaaccagggccaggagagaggaacacatgccttatgttgaaggaactgtttgatttgtgactgaggtgtgtgaacaagaggcaggtaaagtttggaaccaggtaaagcaaaggtaagcctgggactatgtaatgtagggccttgtttgccatgagaaagagtttcagttttattccgcaggcagaaatcttcggagctctccatctttgagtaagcagaaaggagactgtatatatttttaaattaagttacagaattaggaattatatttccatgccttggtctcctgcacacgtagcatcgaaatgaaggtttcctggcctgtgacagagatgaaataatggagctggagaacagtgcagtgattaaacactgggtgttctgcggtgcctggaggaagtacgtggacaattttgggaagaaacttgtgaaaatatgctttcccacatggttggaacaaagaccattttttaaattacatccttctaaatgctgtagtagctaatggtcattgactaaacagccctacaactgtatcctagctgcagatccccatttattgattactgttaagtgcagccagaagtgaatttgctaggtccaatttcctcctaaccctggaagtcagctcagttatgggagcattgttatttgtacaggagctacagacatgcttgtcctcatttagaaggggaaataactctggctcgggcaacgaggctcaagtacttgaggcgggcatatcataaactgcctgagagcgtgactcatgaactctgcaaagtcagaaataggaatatgtcaaagagtaaacatggtctagggatccaaaattttaaactttcattggtttaacattctcattctttgaaaatggccccggttttgaataagaaaactgtgtgtgaaggggacctgtgttataattgtataattacatgtttgtgcaacgttctgctaattattttaagttcatctactcaaatcagggttgagtttccttagttgttaaatttccccggatagcactcaatctggctgtagtgtataactctaagccaacttacaggtacttgtatttaagaaatgcttttgcatttgttttttaaaataatattttgacaatatttaaacttatagaacaattgcaagactaataaaatgagctacattatcttccatgtaagtcaccttttagccttttgctacattcgctttaggtttatcatctatctatccatttttccccccaaatcttttaatcctaaattgtagacatcatgacctttcagctttagcttgtatctcttaagaataaggtcatttccttacagtaaagttgccatagtcaggaaacttaatcttgatattacactattatctaatatacagtctgtgttcaaatttcaccaartgtcccaataatgtctttaacagccatattttttctgascctggctccactctggaagcacacatcacctttagttgtcatggttctttaggttcccgtattttattttttttgtattttattgacatagttgtacatatttttggggtacatgtgatattttgatacaggtatacaatgtacaatgatcaaatcagggtaacggggatgtccatcacctcaaacaattatctttgttttgggaactctatggttctcctctagttattttgaaatatacaatatgttattgttaattataatttccctattgtactatcgaatactagaacttattccttctaactgtatttgaaatagggaggggggttgaagagaagttggttaatgagtacaaaaagatagtctcttttaactgaaacagtttttcagcctttcttgcctttcatgacactgacattttgaagcaaacaggccatgtgttttgttgtgcagaatgttcctcaatttggtttttctgatcgttgcctctagagtcctcaggtcatccatttgacagggatactacataagtgacactgagtccttctcggcacagcaatgaggaaggagatttatcctattatgggtgacgttgactttgatcactggttaaagttgtttctcacaatttgtccactgtcagggtacctttgtcacaatcaatgggtaccttaactgtgattaaatcacctttggggagacactttgagactctgtaaataacctttttcccaacaaacttgcagtggttctagcatcacttaatggcacttggctgaatcaatggtattttctaaccctatcacttcttttctatgtattggatgatatttgactgtaaataagagctttccctttctctccctttctacattttagtatcagtgtagactctggactcttctttcatccagtgttttataagccattgtatyttcaccctacctggagtccaggcagttgcttgtgagagaaaggtcacaaaggcccagcagaggygaggtggggtggtccatcaaccctagagggagagacatcaaccctaaagggtagaaatgaacttcgacttagaatatgaagatgtgtgtcagcagatccaggtctaattccctgtcctgctggtgatgtgaatggccaacgggggctcttgtggagtcccctaatctgatagaaaacactcataagtgggagctgaacaatgagaacacatgaacasagggaggggagcaacacacattggggcctgttgtgggggtagagagagggagagcatgaggataaatagttaatgcatgtgaggcttaatacctaggtgatgggttgataggtgcagcaaaccaccatggcacacatttacctatgtaacaaatattcatgtcctgcacatgaatcccagaacttaaaataagtaaaaataaaataaaatgaaaagaaaacaatgtcttttatctggccttactgatgccattggaagtataggaaattgcagagtagagagaaactcatggaatgggttgggggaggcagttacttagccagagaaaggagtttgggtgaatcatcccagtcttctcacatggccgtttctgcccagttgtgctgctccctgctcctgctgacccatgacccatggctgtgccagacaccattgttacagagcgttctgtttgtcttaatgatgggtgtagtgggaacactgagctctggtttaatcccagttacaccccttgcctgctgtctgaccttgagcacaccatttaagctgagcctcagtttcttcatctgtttaacaggattagatgttctttccctcaggggctacctgtgaggagtccaggaggcatgcatgcggtgagcatggtgtctggaagcagctgatgctttataatttgcaagtgatatgattcagtgtcagcatcctgctcaatgcttggaaggtgcactgtgagctctgggctgtgttgtgtggaggaattaaccttttctgggttaatcagccacgttcactgggccatcagcactgagcaaccactctgccacctgggacctttgaggtggtttctctctttcctttctagagttttcctcttatccctaatccagtcacattttgtatgatgacaataatagctaacctgactagagattgtgtgttaagcatttttctacaagctctatgtgttaagccgttgaatccttataacaaccctgtgagacaggtgtttttattactttcatttcacagatggagaaactgaggtaaaaagacatgaacatattcaagatcctactatcagttggtagatctgggattcaaagccagacagtttggctccagaacccacagttaaccactgggccacacggcctccctggtccagcaatgaggcagaaggtctgtgttctctggttttgatgctgctgtggatttgcctttcagtgaggtctctgcttcctgcctgcctctgcaccctgatccaatgccggtgccacaccagcctgctcatttcctgccatttcctcatgcctggtgtggactctcactgcagcactggctggccagccaccttggccttactccctgcctgcctgggcctcctgccatagattgctcagtctaagaatacaactttagctgctgggctggagaactaggaagcccttcttcagacttactgcccacctggctgtgggctcatgtctgccacacatttgcctccgaagacctctcctgtgagcaagtcaccagcaacacctgtggtctcaccagagccctttctctgctgtgaccacagtggtgcccactgtatggtatggggtggtagggaaggtaggttagcactagagcttggagtcagacaaagctgagattccatcgtgactctgtaacttaccaccttggggaagttactcagcttttcttggactcagttttcttttctgcaaaatggaaacaataatgatgggaggatggaatgagaaaatgtatgtaaaaatactaggcataaaaactcctgaaacctgagtgaggttgtagtttaggtaattctgttatgtccacatcaatttcctggtttggataatgtactagagtcttgtaaaatattatcactgggtgagctggataatgcgtacctgggacctctctgtaccatttttgcagcttcttgtgtgtctataatcatttaaataaaaggttaaaaaaggcatttagtgtagtgcctaatctccattaattatacttatttatttatttaactttaaatttttaaatttttaaacttttgaggcatagtctcgctctgtcacccagggtggagtgcagtggtgcaatcacagctcactgcagcctcaacctcccaggctcaggtgatcctcctacctcagcctcccagttagctgggaccacaggtgcaagtgactacacctggctaatttttaaaaaatattttttgtacaggcagggtttcatcatgttgcccaggctggcgtcaaactcctgggctcaagcaatccacctgcactggactcccaaaatactggaatgaagggcataagccattgcgcctggccgtacttttttaaaaattataaaatatcactaggaattctgttatttggctcaagctcaaccttttgatgtgtgtgttgtggggggaaagagagagaaaaaggcagagagagaggaatccacctaaaataaggcgaccaaacaaattctaaaatcatttccctattctaacacattgaacaacatcaatggcaacaccagcagccaccagtcactttttttcttgctgaaataattttatcttctcccacttgaaaatcttgcctttgactacactacgtgggctctatcctgttcagatttctgattgacattctatttcactgattcttaactcaggctgcatagtagacttatgagctatcaaaccagcctcgctgggtgggaccaggaagtgcatgtttaaaacttctttgrgtcccattctgctgccatgcagcagggctgagaacccccactctgcttgttccaggctcccccttgaccttctcttgttttccttcattcttctccatccacactgccttgacgggtgctgcctctgtaggtcaccgtttctttcatgaccattaaggcccatcttagctgtagtcaccagataaagattttgctcccttctcttcacaggtttatagcatttatctggaatgggcatctaaagatttggaatgatcacagaatgagctttcccaccccacgagatgccatatgtccatgccattttagataactgaagtgtcaccaaatgtcccttatgttgtctttttccaaaagccaattcaacagaatgcaggcaaattgcatgtattcttttgggaacgtgatctgtagaagctttcaaaagcctgctgggcactggctatttttactactatttcagtggctgccgcgtttccctctggataggctgactttgagacattgcctcagtttcttagtccctcctttcttaatattttccaaagtgaaattttgccataaaaataataygcatgccctgtagactgctgataaatgatgagagataaaatgtcctgaatatgatcctcatgatcattttggctttctgaagtcttaatatctatgccttattctcatagttataattatagtgtggctacagtttttttgtcctaattttttcatggatcattttaccttagtcattttgccatgttgccacgtagcatgtatgtgcctgaatgtgatgagtgagcatttatttacccacatcactattgctggacatttagattcttctcagattttcactctttaaaggaatgctatgatataagtccatatccatctaggtaatttaaactgcatcgtaggggcagataactagaatagaaacactgggtcgaagggcatctccacttgataatcctcattaaaagaggggccctgagtagcccttttcatggggcttcttccagcaattcccatcagcctggaacccttaggtttcatgcaactgggatcatttgtcacagctttgaagtgactacttaaaattattacttccaaggtagcctgcccttttgttaaagccagaggatgcctatgctgttttggtgcctttcgctgacacactgctcatgtgaggactgtagtcactgtcttttctgctcctggcagggatccatagcttccctcttttatgccctagcaaagtgggttcagaaaaattatatgccacgcccaaggacacacaactgaacagcagcagagcggagggtgaaacctgcatcattttgacctccaagcctttgtgytttccactccactccatgacctacctggaaacaggagcacagagaatggagtcatgccctactccagagcaaggagatggggtacaagagtggagaaagcatgtgcccaggaaagacttcatggaggttgttgccctcaaggaacctagaatatggtgagagaaatagagaagtaaatcaatgattctgcatagtgaagtagcatttgtttacacttattaaaataaaaatgtcatcataggaataaacagaagaacatttaaaaacagctttattaagatataaatgacgtagaaaaaactgtacatgttcaaatattcaactggctaagtgtgacatttgagcctgtgaacccatcaccataatcaacataatgaaccattaccctcaaaaatttcttcgttctctgttgtaactccttcttcctgcctcttcatgctatccccagtctgtcccaggcagccattgatttgctttctgttgctattgattatatagattagtttgcattttctagatttgtatataaatggaattatgcagtatgtattctgttttcaaatctggtgtcttttacttagtataactacttaaaaagccatctatgttgttgcatgtatgatcatttctttttgttgctgagtagtattctgttgtatggatataccatgatttatttatccattcagctgttggtggacattagcatttgccagtttctgtaatataaatattcccaccatttcgaatttcaaatttccaaaatagattcacagaatggagttgggaagagatgcacacaattaactctcaggaactgtaagagacaatctgcttcataaaggctaggaaattagttctgggcaataaataactatggagtgaagggaattgaagtatttcatgggaacagttggtaagtggaatatctttgtcttggggagtcctttatcattctgtttgtgggggtggggctggttctaacttaaaaatagctggtttggggactttgcacatgtgattgctaagaaacactattgtgtttacagagaccgtttggtttgaaagaaggtttattgcttaggaaataaatactgattattggccagagtaagtaatgtttttaggatttcttacagatacgattctttgaagaatagggacctcatctgggaaaacattttgtttttgagtccccagagacctaggtttgaatggggactttgtcatatagaactcatgcaagctgcttcctcctctcagcattagttctcaggtatagaacagaaatactcagagttacattgcatggtttttgtaagcattaaaaaaagatactgtacttaaagctcagcatggagctaggcccctgctggtggactacaatggttgcccctagtactaggaagcattcaaccaatatttgcaaatgaacgaagacctaacccttatgtggttcttagtatgggtctggtcctattcgaagtgctttgyatacattaactcattgggagtactgaaacatagttaagtaacttgtcatgtttacttagctctcaagtggtggagctggattttgaacccctgtagtctggcctcagaatccaagggattaatccctgagctgtgcttaatctctcaggtgagttttaatggttccacctgtttctctggatgcccatcaggaaggtgtgagattctgtcatcttggaagatcatctttaaccccaatgcaccctagggaaaccctactgacctttgaagaaagggaggctgggatgctccttcataggccagaggggagcccaggagggtttggaaattctgccagcctttgggctggcaaatgcaagggcatttgacattctaggctctttatcactgaggacttaatgtggctgactctcttacacagtgtgagtaacatctcccagagctgggctgcgattatccaaacatgtaaggccacccaacaatgatgtgacccggagcaaagtggctctgccagaagccagccagggcactttgggaatatgagcagctctgctctgatagttgagttgaatccggtgctgggagtcagttctgcagagctgtgtgaccttgggcatcaggttagactgttgattgaatatttgccacatccttccaaagagggatgatctttcttgacccacccaggaacttagatcaacaacttagagatagagattatctccttgattagagtagaagcccgttttccagacagaatgtgggatcattackttctcttatttatgcttcattacccacaatgggggtggagtgggggtgggcaggaaggctaagccctgtttgcctgtttgtttaaagacagttttcttaaaagaagttttttgttataaaagtgatacatgcacatggaaaagggaaaaggagaaaatgccactcattgttccttctttccaaatgttaaaatttgatggactttctttatgaacgtttaactcctttgatcacatagtatcacgttctaaaatttaccattataacccgcccaacatttctcccatgtttaaacatccacaaatataaaaaaattataaatgttccttagtggatgtactgtaatttagtcaactgtctctccatatctggacactgaagttatttaagtgtttttgcaatgtaatataagcaatgccgtgatggacatctttgttcaaatagatttttgtagatttagaataattttcttgggatagagtctcatacttcaggcagaatttgtggaattgcccagatgagcagtgtggtctgagatcagaggtgttctggctaataatttctctgttgtccttcttcagacactgttccaaccctccttcacttgacattttcttaacaaacaggtgttaactgtaatcgttttggttttagaatgttttgctttgacccttcccctaatagaagcataatatctaactaacttcgatgttcatgttatctattgacataggacgttggggaggatcctttctcagcttttcctttctcagctttactcagcattctttgggtactctgcagtgtttaatttaatctccatacatttgttgattaactgaagagcaggtgtggtcaattgaaggtactttaattgggagtcagaaaatctaggttcaacatctggttttgccattttaccaatgtctttacacatagcgatgaacttttctgaatcttgttttccacctgaaaagtgaaaatatctttctcagtgagtgcttgtgagatgattagataataagcttggtaaactgtacagtgttatgtaactgaaatccacaattattgtcatatatgcaaagtggcctcctggatgctgtgggtaacactaagatgaacaattcattgatttatttattcaacccacatttatagagtaataactatgtgcaaagcaatgacctgggagctggggatacggcagtgagtaaggctctgtaaatccttgaggagtttacagtctattagtatatatagtggcgttgtccagaatggtagccattagttacatgtggacagtgtcacaaagggactgaatttttaattttatttaattttaggaaacttaaatatataagtttagaagctaagatcaatttagttattgaaaaacacctactattggaacaacttgagtatgtgaatctacttttctcaaatktccattttatgaaatagaaacatagatcaagtctttctgatgaaaacttatctgccaaattgagatacactgtaagtgtaaattacacactgatttctaaggcttaatatatacaaataaaatatctcaataattttaatattaattacatactgaaatattttagatatattggttaaatacaatatgttaaatgaattcactgatttatttttgctttttaaaatgtggccactagaaaattagatatgtggtttgcattatatttctaatgggcaatggtaataaaaataaaaagatgtgtgattcatagtagtgagattagcacagattgcctgtgatacagaatgctctgggaattttagggttgtggggagaacagaatcattccaccagcagggagttcagcaaggcttcttggaatgatgtcatttaactgagttttgaaagcaagatatagttattttaaaggttaggctttttttttttttttttttttagcataaatgggttgagaggcaagttccagggagaggaagtagtttttgcaaaggcatagtggtcagaaagtttggggcctgttattagggagtataatggcttcccccaactcccaatgrcatcagctttagctctctgccttgtctggaagtctcagccagttaaggccctttcaaacccagatcctgcccaggtatcctgcaggactatctcaacccctcagggggcgatggagaaaatacatatgggaattgtggttgtctcaatgcttggagggggggtgggaggaagattccaagttcctaaaatggaaggagagtccagcacaaggagggattgttttggctaaaatgccaatagtgacccaactgagaacctcctgggatgcccaacagaatggctttgggagctttttcaaaatatccatgtgtgggttctacactagacctcctggaccagactctccagaaaaaaggcctgggcatgcatatttaaatagttcaaaaaaggcataattaatgtgtgtatgtgattaaaaattcaaatagtacagaaaaatttaagaagtcttccttttggctaatggccactgatatttttcccaaagacaaacattttatgcaaacacaaagcatacctacaaacagcgtctttctttctttctttttttctttctttctttcttttctttctttcttttttatttaccaaatgagctcacactaaatgggctcttcaacatctttttttttctgaaaacaattttttaaatttctgggggcgattttccatgtcagcgtatgctgattgatttacttcatccttttaaaagacaccagagtattccattatgtgaatattttctaatttacttagcgatgacttcttggtggggatttagtatatatctttgtacttgcatcttgaagtatttttgttcatttttagcagttgaattgccagatcaattaaaatggaaatttatattgccaaattattttttgacatttttatcatagtttatactcttataaacaatatatgagaacaacaatggaaaaatacctccaacttatcccttggttatgaatccctgttttagtaaactttcctgactttcttaatttctataaaaactcattttttctatgccttattcgcttcatattttgctttcagaaagatgacagctacctaatctgatcagtatctgttaatatattactccttgtggttggcacaataattcctccctaagatgtccacatgcaaatccctggaacttgtgagtgtgttccctcacatggcaaaaagggtctttgcagatgtatttaggttaagaatcttgagatggagagattatccaggattatctcagagaacctaatacaatcaaaggtatcctgatgagtgaaagagggaggcaggaggatcatagccagatagagatctgaagatggcacactgctaactaggaaaatggaggaaggggccaygagccaaggaatgtaggcagcttctagaagctggaaaaggaaaggaatgggtcctcctctgcgaggcactgccaacactgtgattttaccccagtgaaatccattttggacctctaacctcaagaactgtaaaataatgcatttgtgttgacttgaagctactaaggttgtggtcatttgctccagtggcaatgggaaatggatacactcctcccaaatagcacattaggtggggtgttctggagagagtgctgttaacagaaatgcagagtttcaggcaccatgacagggcactggtgtcagaataaccttagagtcctgggaagtccttgaaactgagccacacggcagccatctgtccatccatctgttattattagcttccagttcccccatgctaactaccccttcttattcctccttacttaaattttctccttggaaaaaaatgtagctagctaaaaatctaaaggcccgcagataatccagttctcagattgagggtacagttttcactgatttatttttactgcagataatgagcacaaaaacaaagtggaaaaatcactgttctcggagtcagaagtctggacgttcaaccctgcctctgccactttgtgtgctttatgaattggggcaattcattcagtctgatatggtttgtaaaatgggattggtaatacttgcatcagaattatggtgaaaataaaataaatagaggtagatgaaagtgctttgtaaagggctataaaattcaaggcactattttgaatagttattagtaataataataattttgtaataattataattataggcatcattagtgatgcccacagaatcatgaataatcacatcaaaatagtcaattatcactataaattactgtattgtattttaaagtacaattaataagtagatgtgaaaaaacactcatttgaacctgagagtgggagctttgctcagacgggaatcctcatctctgtccatctcatttactgtttttcagtgtgtgtgtgctagctggcaagtgacacagctaatgggaaaaagggtgtgagaatggatggtctggaaygtgtcagctaaacctgaagcatcattactctgttgttgtcctttatttaataagtagctatgtcctgcgcaatacctctgtgagcagttgctccatctccattgtctttattggtttggctcaggtccctcgttcctctcccttcctaccatgatagcctcccaaatgacctttctgcctttagaatcttttcatccaatccagcctacattttgccatcacagttatcttcttataacagattctaccatttaaaaacctttagtggcttcccattgccgacaacatctgtgcttgacagaggcactgggagacattgttgaatcaaagtaatttgctattgctaataattagggagcagaagtctgtgaataatttatactttttgttttactctttaaaaaccaattacarcaaggttcactgtatcattgctgtctatccagggagagtaagggtggagtaagggtggaattagagctaacgcatggaaarttcacaaacaacacccagccatgactgcagatggtggtgttcatcatttacattaagggggaaatagttgagacccagcagctcgaagaataaaatccactacctcttgcatgtcagcaaagggattcattatctggtgccagtttggttttgctcccgccctctcacccctaaccatacctgccttccgtacttctatgctgctccctagccacagcaggtatagggacatttgtttcctactcagcatgcatctttcctttccatggtgacagcagcctggtttccctttggggaagtttggctcccctacttccagctcataggttgatcccacctcttagcccctcaggatgggtcctgaatcccgtgactggccagaagaaatacaggattcctccagccatgatgaktgcctggagatgggcaggtgtttctggctgggtcaatcaaaacctatctgtggtttttcaggaattactgggaaagtggtgctgcctttccacaaaggctgccaagctggtagtattcatgtctggagctgccaggggtcctgttgcaccctggggaaaatgcctacctgtatacaaagctggcacagaagagagacagagagacacaaagtcttggtggcttcatttgagcccctggatccatttgaaggtagataaagcttggttttgtgagctgatatagtgtctctctgtctctctgttgcttaagtcaccatgagttccttttctgtcacctcaaatcaagagtctgaaacactagactctttatcactgcccaccatggcaagccstttatgcttgtgtgtttctgctcattgcctgggatgcccatctccatctctcaattcagcagcattctatttatctgtccaggtctgggtcagatatccccagtgccttcccaccctacctgggcagaatgcgtgctcttgtagcgtggggtcacacacatcattgcactttgtcttacagttagctacatgtgcgttagaatttctggctctttacgtaagggacaccaaatttcagacactttaatttatgtctgtaatacttcgcacaacttctgtgaatagacatgtaatatttgttgaactaaatttggcagaaaaagaggacaaataaaaggaggaaagatagaaaataaaagagaaaaagtacattttgccctttaaaatgtgagtcttgagctttggctgtgggcagaggaagatgggaacaacttgttgaataacaagttaaacctatttaatctctttttctgggaactgtttgcacttgacagctgcagaatatatggtagccccccagacaggaggaatttatcacagcacrtgggaatggcaagaagagaagctcaagcctgattccatctgagtcacgtaaagtcacggtcagtgacrctgcgtcctgcatagctgatgggatgtctgctcttggaatgtctctcaggattctacccttctcgctgttccctaggtcaggccgttcccactagaatactgcagaagtcttttcatggggctccccagtcatctcgtatgtgggatcagaatgatcttatagttcagctctgttccttttactgccttgcttacaaaacttaagtacctaagggatctctttaaagcatcacttaagactcactatggtatgacctgaactttctttcacagactcatttttctaaatctttccattccttcccatagtgtcccagctaaagcaaatcaggtgccaatccctgctgttgaccatgccctgctgtggttgtctttgtagttctcttacggcaatctctccacctacaatattcagttcccractctgcaagaccaaaagctgtcattttttgagggtacagacaaatgctgcctcctctctgaagctatttgccagttgaactggtctctccacactttgaactaccctaaaatgttttggtcatgagagttatttgtatatatatatwttttgtgttgggttaggctagctgccagatagccctcaagtctcagtggcttaacacacaaatactttatttcttactcatccaccatcttatgcagctcgagcatctcttctttggggctacctccaaccggggactcaggaatctgggcagcttccatagtggggctttgccatctcagaggccttagcttccagctgtacatccagagaacaggagagaaaaagagaagatggtggatggtgtgggatgtcttagaggctagcctgggaagtggtgcatgttatctccacctgcacaccactggccagaactgagtgatagtgtccctgtctaaaagcaaaatggctgggaagtgcagtttttctgtgggccctggacaagaaagtgggattggtgagtgtctggccagtcactttcacgtcccttctggagaagtttgtcccatttctacaccctctggccattctgagcaaagtaccccaaacatatcaggctgcagggaaattgacacccttgagggcctgtgcacaggccgcactgcactcactatgttctgctattgcgatgttattctttgctcttgagcaagaataaaacctccttgagtgcctttgcccttgtaccttcctctatcccccttctcccctcttcctattgttccttctcctctatttcctcctccttcccccttctccttctgccttttcttcttctcttccttatctatcactttctccttcttctcctctccttttcctctttatttaaaattgtcctattctctttgtcttctcataacctacttttcattcccactcaaaacccaactgcagaaggtgtaagtgcacagagtcagcgacagacatgtgtgtggtcatggacaaactaaaaaaaggccagctatttcatttccttctattatttttkggggggtgggtgttaaataaactttttatttgggaataattttagttttccagagaagttgcaaagacaatacagagtgtcaccatatacctcacccagtttctcctaacgttaacatcttatatttctgtggtatctttgtcaaaacaagaaagcaacattagtacatggctattgactaaacttcaaactttatttggagtttgccaatttccctaccaatgtcctttttttgttctaggatcccatccagggtaccacactgcatttagttgtccttgttctttaagtttcccctggtctgtgacagtgtctcagtctttctttcctttggatgacctcaacaattttgaggaatactggtcaaatatcatctctctgtttgggtttgttgatattttttctcccaattagtttagggttttatgatcttaggaggaagatcacagaagtgaagttctctcctcatcacaacctaccaggcatatgtggtatccacatgactaactcactttgctagacttgatcacttaattaaggtagtgtttgccaaatttctctactttaaagttaccgtattcccctttccatgctcttttttctttttttagaaatggggatcttgctatgttgtccaggctggggtgcagtagctattcacaggcatgataatagcacattacagcattgaactcctgtccttgagctattctctcgctttcttagtagctgggactatatgtcctttccatactcttattcactggaaaccagttcactaagtccagccacacttatgagggatgggattaagctccacctcctggsaggaggaatagctacttattttggaacatcctattctttttgcttccccacttaaatgctttcaaagtttttaaatagacttcagcctgaaaggcggacataaattttggccttaaagctatttccctggcaaccaaatgaggagtcttrgaaatttttattccacaggtaagagagagagtccatagggaatcaaaacaaagcaagtgaatgaaccacttagcatataattattctgtgaagtagcacaccttggagttggctaatagtggcaagatgctgctggattcactccctgcctctattatacatcccacatcctcactctcgagtgggcacgctgaggcaccagcctctgtggcaggccaaagtgctgaggcaccctgctggctggtaagggaagtgggtaaaaggtgtgctttgtcttgtaacagccccaatcataccctacctacctagccaagcttaaggcctcagaaagtcagagagggacctgcagaatgtctgatgggaggtagagtttccgcttcaaagcctgctttctcagctgtcaggaaaagtgtgaagggaatgcttttgaaataaaaattgaaatgaatcacagctttaattgttttccatttataatcatagttggatgagatcatctaggcagatcactttattctacacgtgagaatccacagatgatgtgaaagtaatgcagctgagtgcaggaaacaggccactctgactggtctgctaattcacatgctctttgtgacatacggttctaagaggcagaggctggaagagaagtatgtgggttttgggatcaagatacccaagtttcagtcttgacactgctatttcttagtcaggtgaccactgtaacttcatcttgcttgagcctcagatttctcacctgcaaaatggagtttgaaatttgctttggttggttgtcayaaggattaaatgaaataatgcctgttaagtgcctatccagcacttaatagatggcaactgcatcagaatgctttgggcacaagtaacagaaaatccaacccaaagtggccagaagaatcaaaagaatatttatgttattgcacatatgtagaagaatagtagtaggataactccaggattggttggttcagaggctgagcattgtcatccaatgcccaggttttttccagctttctgctctgtcatcctcagcatgatggttaggccttagaccagctytcctcacagtcacaatatggctgttgaggttccaagcatcatgttcatagatgacagctctggcagaagatgagatatctcttccagtgtcttcgttaaggaggaggaacctattttcaaaaataaccctacccacatccttccttctccagctgactactcttcatgtctcattggctaaaattacatcaaaaagttagtgtctaaatcatgggccaccataataggtttataccaatcaggatcaattcctgaggcaaagcttggaagcatcagtctcctctgatgcaatgattacactttacctggaaaaacccctggattcctggattctattaagagggaggagcatctgagtacgtcaaaccttttgcatgtccaagcaaacarggacactgagataactcatgaggctggctattggcctgattgattaaaatatggatacttcttcctcccttttgaattggttgtttggttcattctcttcacagagtttgaaggactctcactaaatcatgtctaaagaatgattgatttgagaccagcctgggcaatgtagcaagatttggtctcaaaaaaaaaaaaaaaaaaaaaaaaaggttgattttggtgttgcctgcttgtagtcctagctacttgggaggctgaggcgggaggatcacttgagcccagtagttcaaggttgcagtgagccgtgatcatgccattgtgccccagcctgggtgatggagaaagaccctatttctaaaaaacaaagattgattactccctcttttcaaatttccaccaggatagaggtatctgaatagtttctggcatatcaactctggttaattatttatgttgaaactgaaattgaataaaattacaaactgagttcctccattacactaggtacattttcctccattacactaggtactgttgggcagtgcaaattatgaaacatttccatcattgcagaaagttttactgcacagcacttttctctaaacctttcaaattaaaaaattctgaggaagtgagagactcaggattactaatgtctayttatgaatttaataatttggatgggtaaattgatgaaaaaaatgataaaaatgatctatgggtcaacatttagaaaatttcactgtaagttatttgtcagtttatctatataagctggaattaacaatcctcaactacaaacaaaactacatttgcagtgagttttaattaattaattaataatttttattactcattaatgcccacaaacctcaactcttgggtattcagggagtgatggtccctgaccttattgttttctctcttatcttggtctgcccagtattctgtgtttcccagctgctaacaccttcattacggccagatgatggggcaaggagagtgtgctaaattcaaacagtaaaaaattacagcttgtcagtgtcttgggtgaaggtttggtgggagaacatcagtttgcataaggagttctgaggatctgttgatataattatgtactgacattattaataataggatctcatattggaatatccctttcacatttatttcatttatttttcataacacacctctaagttattttattatcccaactttttagacaagaaaatagattactactatgtggtacattagtttgggataaatttttttaataaagtaagaactcagcttgaaaaaattctcactaaatatatatggcacatgtttcaaaaggatataaaactagaatttgaacccaggactcctgattcaaaatttattgctacttatattatccctggctgccattctttgttttctactacaccattgtattttacctctttgccagagataaytgacaaatggccatgctaaattctcatagggagttgtaaaatacaaaaataaatggactcaatccataagtaatcctggaaaaacctggggattttgacataaaaggtatgctaaattatgacacaattgaccaatcagagatgtaaacacttatggatggatgcaaacctcttacttactataagtaaccatttccttgtacacactgggatgatgtcaaagagaattggagggaaggaggaggggatggggaattgaatggatagacacatctcttttctcttacctattcactattaatgttgcttccagacaggaagcactctttcaactgatgtagacaaaacttgaataataggtcgaataaattgtataacaaatattgaagtagaaaatgattattggctctttttgttatttaatctgatgatgaacagccttggtcatttacccttctgctgcttctccaggggatggaggaaatacaacaggtggcgatgagaccattccccatcaggttgattattttattttagggcttttatttaaccatggttgctaatcagctttttcccaggcagcctccacattgctttttaataatggtgacacctaagcgaagcatatgacagggattggtttcattgtgttgcctagaaaatggagcatggactcaaaaggtgctgcagtcgcacagcccttgaggaatcaggtgactctggggtttttcctactgaagaatgaagaatggaagtgctggggctggggtgtatcttggtctatttttagattgctgtgattgattgctatgcatctttgcttgcrgcatgaaatctggtttctggaagcaaacttcccttcacagtacatgttgggtttaacattgtgtagggtctttattgaagcagacttttactttataaaaacactatgatagtcttatgctccatctggataactacatacagggataaaataaatgatgaatgaatgatggagtgaatacatgaytctgtgatcaagaatgaatgcataaaaagaatgcaatgctgtataaatgtggggtttaaaaagaaaatctcctgggcataattgttttcttcttttctattaaggactgataaacaaacaacatcaaactacttcagttaaacaagtgaactctccatgccttttcagatgaagataatttttgcgaaaggagggagatgttttagattgtgttaggcccagacacttcctctgtttaattatgatgtagtgtagatttatcctgggggcaaagaattgagctaaagctatctcaacatgcaccaacatttcagcagctccggccttcccattattggtacatgcctgttttggccccttctgcctttataactaaatatgcattagaaatagtcctttggtaaagtataaaatccaaggaaggtgtaacattgagccatttggaaccaatttattctttcagcaaatatttattgggtattttaatatgtgctagacactctgggcacagggaagcaaaaaaatggataaatgattagtttagggttagtgggattgttagtgctatttgtgcttcctttagcatgctgtctccttttaaaaaataatgcaagtgagccgagatcgcaccactgcactccagcctgggcgacagagtgagactccgtctcaaaaataaataaataaataaataaaaatgcattaattttttttaaatatctgtcagatagagattttatactcaaggcatacaatgtgatgatttggtatatgtatacactgtgcaatgattaccgtagtaaaattaatgagcacatccttctccactcatgctgtatattagatccccttaacttgttcatcttataacttaaagtttgtaccctctgaccaacacatccccattttccccacctctacctcctggtaaccacaattctactctctggttctatgagctcaacctttttagataccacttaagtgaaatcatatagcatttgtatttctacatctggcttatttcacttagcatagtcttccaggttcatccatgttactgcatgctatcatgtctttgcaaatggcagaattttcttcttaattgtgtctgaataatataccacactttctttattcattcatcctctgatggacacttaggttgttttgatatcttggctgtagtgaagaatgctgcaatgaacatgaacgtatagatatctcttcaagatatgaatttcattttctttggatatatactagaagtatagaagtgggattgctgggttatgtggtagttctattcttaattttttgaggaacctctatactgtttttcataatggctgcaccaacttacatgcttaccaacaatatacaagagtttccttttctccacacccttgccaacatttatcccttgtcttcttgataatagccacttaacaggtgtaaagtaattgttgtttagattttcatttctctgatggttagtaatgttgaacaccagtttttataccttctggtcatttgtatatcttctttggaaaaatgcctattcaggtcctttgccatttgaacattttttgtttgtttcatttttttgctattgagttgtatgagttctttatatatttttatattaaccccttatcagatatatggttcgcaactattttctctcattttgtaggttgctttttcattttgttggttgatccttgagaactctcacttctcaccatcactgccttaaacgtttttcaaagtattcttgccaacatcctatagggctcatcatgagaggagttctggtaaatgcagttttctctattgtattacattttccttggtgttttagtgttcattctagactggcatgttgggaggtggtgcccaggaagtctttgtctcttgttggccttcttttctttcctcagcctcttcttattgccctttttattctgccctttcactgggattgctcttgtcttggtttctaccaattcccatgctgtcaaatcttattgccactttttggtctcatctcacttgatccatggtactgcatgctacacagttaactatttatttatttatttattacacattaagttctgggatacatgtgcagaacgtgcaggtttgttacatgggtatacatgtgccatcgtggtttgctgcacccatcaatcaatcatctaggctttaagccccacatgcattagctatctgtcctatctgtctccttccccttgtccccaaccccctgacaggctctggtgtgtgatgttcccctccctgtgtccatgtgttctcattgttcaactcccacttatgagtaagaacatgtggtgtttggttttctgttcctgtgttagtttgctgaggatgatggcttccagtttcatccatatccctgcaaaggacatgaactcattcttttttatggctgcataatattccatggtgaccagtgtgatcatcccattcttctatatattttttttatgcctcattggctatttcttctccatatcctttactggctcttcattttctagttgacatctccattttagaggatcttagggcttcatcctgggcctcttctctacccatattttaagtgatttaatctgtcccaggtctttgtcttttgtctcaattcaagatactagaatgaagatatgtgtggctttcttgaatgaattctttttggggttttctaaacttcctgaatctgtacatttttgtctttcaccaaatttgggaagtttggggcatcttttttattattttcctctggccaatttttaaatcttcttctgggactccaactaccttatgatagaccttttgaaattttccacwgatctctgaggatctttaagtttttttcaacatttttcccctctgttcttcccattagatgatttctatgatatctattttcaaattcaccaaatctttccatagtcatattctttttgtggttaagtccatcaggaaattttaaatttcaggtatagtattcttcaattctaaaattcctwttatgtttctttttatatttataagatataaatatattttatatttaccagctgaaatttcctgtcttttcattcattgtgagcatgttttcctttatttccataagcacggttgtaatagctgctttcaactttttatctggtaattatgatatttgggttaagattgacttgttgaggatggatcacattatcctggtttctcatatatatactggaygttatgaacaatgtattgcagagattctagattttgttatgttgccccaaagagtattgatgtttttttatttagctggcaattaacttggttcatagtctaaatataagctgtcatgcgtgtggtgggtggtcactcagatttcattttagtactttaagacagagctgcaagtgaaggggtcatccagacatttgggctaaatttatacactggttcagggtccttcctcactccctggcagcagtggatgccccaggattttcccctggttmcttcagccaaaaaactggcaggctttctatttgtgtcttcactatcttcttccctaccactatgacatccctcagaatgaagctccaaaagagggagaatttactctgtactggtgacttgctccagtttcaacttcctccaaaaccttcctgcctttatctagtctccagagccttcaggtagttgctttttaaattctttctagagtttatagctgttgtttgctaaggatcactttgttagacatgctcttctgtatgtcagaagcagatatagctcatgtctttaaacgctgtatatatgtccatgactgccaaatttatatctttactttgcccatcccacctgcaccctcaccctagcttttcagttctggactcaaatattcaacttttttatttaatacttctaatgcatgcctaatagaaatctcaaatttgagatattcaaaccagaacttataatttttttcctaaattttatctctcttaatattccctatcttagtaaatggcagcactctttacttcacttttcaaataaaaaataaaaatctcggagttattcttgatttgttttatcacaaatcccacatctagtctaataccaagttctcactagccgtacttctaaaatatatcttcagtttgctcttttctccactctagtccaagccatccccattttcatctgattactaaaatatccttctaactgaactggactccttgattctattcttgcccccaacaattttctgggtagcaacttaactgatattttattttatttattgtcattgttatttttgagacaaagtcttgctctgtcactcaggctggaatgcagtggtctgatcatggctcactgcagccttgacctcctgggctcaagccatcctcctatctcaacctcctgagtagctgggactataggcatgtgccaccacacccggctaattttttttttctatttttttgtagatatggggtttcactatgttgcccagggtgattttgaactccttagctcaagcaatccaccttggcctcccaaagtgttgggattacaggcgtgagccactgcaccctgcttaaccgatatgataaaagtcaaatatgtatcatgccaccgtattgcctaaaaccttccaatggcttcccattttgcttataaaagggtcttttctcctcaccttgacctaggaggttgtccatggctggctcccacctggatcccgtttgctgcttgctcactgggctccagctctgctgctttctttctgtgccttggctctaccaagcttccttctgctcaaagccttacatttaatctttcctctgcttgaagcaccctttacctaagtcatcatatgctggctccttcttgtcatcagcagttaccttaatattatcttcttagagagcccttccttaaccattcaaacaagccaatcaaacaatgatttaacaatcattgtctgttaaatcatttccttctttttgccattgcacattactactactactactagtgctactactactactattaccactattacttctactattgttttctaacttctttgtgtctcccaactataaactccatgaagttagagtctctgttgtcacattcactgttgtgtccccagtgtctaaaacaatgcttggttktggtaaataaagaggtgttaaatgaatgaagaaatgaatgtgaaatcatttggaaggcaatgtctctagtctagaggtgagaaaaggagaagctgaactaggacaatggcaatcaagaggagggaagatagacccagtgggttatcttatcatgaatcatattgtcagatcagtttgaaattcaatataagtaaattatcctaaggcaaagtttggattaggcccaataggcctcattgactctaatgagatggtttcatcagggcttctaagggtcactgattcattattggagactcaaggaagctctgatacttccttctaagtatttaaatatttaaaattttaaattcatccatccaacccatcaaccaaccaaacaacaaataaatcattactgasaatctaccatgaactaggttctgggccagatcctggagatatagaagtgattaaatacagaccttgtgttttcagactagtagaatcagatattcaaaaatgtctatctggcaaaaacgtctgtctggcattcagtgctatcttgcatgataaatgctctaatgggtgtgtgtgacaggggctctcactccaagagtgagtgtaattgcttcaagaaaaattttgaaaggtgatgcttgaatttaaaactcctgagacactaagagaaaggcatgtgtacaggttcttgtagagaaaccatgaagagatccataacctgtgggaaagttccagcactctttggtggaatgtgtcagtctcrattcacatagatttatcctgacctccttaacttgaagggacctaaagggaacatgaaacagggtgtagagcacaaaatgcccagtaaaagttagtaataagtatgtacttattaccattattattatgatgggagttgggcagatcatgagatgaggaggtgctcttatactttttgtcatcacttgcccagttggaagggagtaaggggagagaggttacaattttttaggattgttgactctctccttttcttcaacatgatgtgcatggtgatgttatttaaattcttcattatctcctgcaccagaggtggtcaagcaaaggagaggcgtgtgggagtctgtttccctgctggctagattttttggtgaatactacagggacaagaagagtttgtaagatggaccatagggagttaaggaagtgaaggactgtggagattattttgaggttgaggaacaagagagctaaagagaggaattcattacgctgaaattacacatacaaataatgatcatactaggacagtagtacctgagtatcctagctcttaggagagtgaggtactttttccagaataccacaggaaacggagggagagagaaagcagggaggagagaggaaggagagaaagggaggagaggagaaagtccctaattaacattcatgtcttgacctaatttgtagtgtactttcattgtcttaattacctcctatgttttgtaatgaagaaatgttagtttccatttattccagaaaaaactctgtggcatttttccatccaaaggtagatagatagcttctgcagtgagagggaaagatagttgttttgaatgcgaaagggataacttttctgttggtcctgccttttctgtttgcatattgaggcactattttctgaaaataaaaacaaacaacaaccaaaaagggaaatctagataataaaacaaaaataatcaaagtaaggagttagcttggtttttggacttgtatattaaaaatatgtttccactattattgtgggaggtacattgtttccaggtaacagggaagaaaaacttggaagcttaaaatcacaattttataattctctaactttgtaaagtaccatgtaaaagaacgttaggactaattatattggaacaatgtgtgctctgttttaatactaaactgagataacagagtcattggaaaaattatttctgtcctaactcagtagaagaaaaaacagaaatccattaaaacaatttggagtctttgaatgtaagcaataaagaagttatactattagaagactatttatgtgttttttcaagttaatgtagagtgacttgaaagtacttgcaaaaagttttgaatctgaggaaagctggtattaacctcaaggtaattgaaaaaaacaagagtgagtttgttagcatgaacttttcttcttttgataaaccactactgatgttaacctcatgacaaagagaaacttgagggttatttattatattttaacaaatttgaaattatgtattttttattacaaaaatgttacatttacattaatatgctgaatttgatcagcaaataagtatatattaatatattgaaatgagtacaagttaatcaaaaataaaatttaaaaaatgtaattccaatacccagatataatcattgcaatattttttatatctttttactatttgtgtatgttttctcaaaaacaaataaaagtgggattactctgcctgataatcttctctttgcatgagtgccatgttttcctctgtcagtaaatgtgcatcttcagtatggtggtctctaccattttttcttttttttactctagtacaaccaacagattaaacacagtcttgacagtgatattttatgtcaattctgttttttcaaggtataagaggttgggacagaaagaggaaaaagggtctatttttgtagaaaataattcacatgactaattgtcaatatcacttataatgactgcacaaattatattgttttataaacatattcccaattgttggctgtttaggttgtttctcattttctgttttttttagatttttctttatatatatatatatatatatatatatatatatatatatatatatatatatttgttatactttaagttctagggtacatgtgcaccataatatgtaatattgtgatacatattgtttaatggcaagcttccccctgcaacacatatgattacttccttaaaataaattcctagatggataattaccttatcaaagacctcttcttgcactagtagtacattgatgttaggccattgayaaattgtcccccaaagctgtgatacccgtttacgttgttactagtagtttatgagatagtccatgttccacctcatttaggccgagatcattaaaacaaaatccatgctaacttgatggttgagaaatgtttatggttttatttacattttataactgaataatgaagtcaaacatttttatagtcttatagaccatttgaatttcttctttcatatgtgtttcttaacaatatatatttgtcttattgaagtgtaagaattataacactatcctatttaaatgttatacatgttgcaatctccccattgtatgtttttttacttttaattttatgttgtgtgttgacatataggaattctgagaaaatcaaacttctcaattctttatgtttcatgtttagaacatattttccactacatataaatatttctttaactatttatagtaaatagttaaagcattcatttggctctatgcttttcatttatatctttaatacactggtgtttattttggtgtcttacatacaataggcactaaattaattttttttactgacttgttatgtaactaatataataccaactcttaagattctatctctagtaatgttaaatgccacactttcttacattaaattctaaagtttacttctgttcttcctttcttcaattctaatccatgtatgtgtctgatttgtcctacattagyataacattattgtatttactatagctttttaatgtacatattattatccgattgggtaagtttcttttcattgctgtccttttctttttcctagaaacaacataatgaatgtatacatttattcttcaaggtaaaacttagagtatctttgacatacttctaaaaagtcccgttgaaattatactaactttatggttaaataggggataatttacatctttacaatattgagtgtcacagtccaggaactgatgtgttcttcttatactagtccttattaatttttgatatgatttttgttatgcttatttctaggcattttatattttattgttgctattagaagactgtctccccctattatrttgtcttgcttattgttgatatatgagaaagtaatttttaaaataatataatttgttactttcttttcctgacttcttatttggttctatttttagttttgctggtagaaaatcatagcatttgaagattaacccaggaaagtttttttctattatgtctttggttgtaactcttgtttcattggttctgtcttttcttcaggagttcctattatagtaaagtactctttcagttattttctctgtattctaaagaacatttaaattggtcttctacattattgcctgtattagtcagggttctccagaggtacagaaccaataggacgtatatttatgcaaatatagaaagagatttattataaaaattattagctcatggaactatggaggctgacaagtcccaagatctgcagttgggagtctggtgaccagagagagcagatggtattattctcttctgaaggctggcaggctaaagacccagaaagagctgatgtttcagttgagtgcaaaggtagaaaagaattaatgtcccaactcaagccagtcaggcaggattgacagccttttttgttctgtgcaggccctcaactgattggatgaggccctttcacactggggagggcaacctgcttttttcagtctaccaattcaaatgttaatcttatccagaaacactctcacacgtatactcagagtaatgcttggccaaatgtttgggcatcttgtggcccagtcacattgacacacaaaattaactgtcacattgcctcaattatcttcaaggttcattctacactttacttctaatttgattttaattcagccattgtactttttattttcttgtaagtcttccttatctagtccagtacctctctttttttgtgtagtaaaattttagtttagtttatccctattatttcactcttctatttcatagagactatacctttttgtactatgatattggggatgacaaatagttatctaaaattgttttctgcttccatctttagattattgtcacagatatactccttttctgagttatgcaaattgagctttccaaactctgtaatacatcagtttttcatagatcctgtgttatttactttttccttagttatctagccagactccctgtttgtcagtgaacaaaattagcaggttacctttcattgtgctctttatatacttatgagtgacagctatagtgtcatttaatgtttaaatgcctggagtctggagccagacggcctgagttcagaacctggctctgccactcttccttgagtaagttaccttatttttcttggtctcagtttcccatttatataaaggagataatcacagtgcatatttcatagrgttgcattgatatttaaatgaatctatctatctatctatctatctatctatctatctatctatctagaatagtggattgggtttctgtgattcactggttctttcagaactttcttttatgcaggaataatggtttccagtgaccagaaaggttctaggaaaacaaaaacaataatgattaaccatgattcctgtttcattcctcaagttatcaaaagtaaacttcttcatggtcaaatttctcaatcatattgggacaggtgtctgccccaatagttccaattctgcatctattaagtttacctataatgtgtaggtccagtgtcttgaggcatgtgaccagcaggggcactccagaaactgctggagaacagcttgcttcttaattattttatcccattatgttttttcttttttttaaattttactttaagttctaggatacatatgcagaatgtgcaggtttgttacatagatatacgtgtgacatggtggtttgctgcatctgttgacccatcctctaagttccctcccctcgccccccaacccccaacaggccctgatgtgtgttgttcccttccctctatccatgtgttctcgttgttcaactcctgcttatgagtgagaacatgtggtgtttggttttctgttcctgtgttagtttgctgaggattatggcttccagcttcatccatgtccctgcaaaggacatgatctcattcctttttacagctgcatagtattccacgatgtatatataccacattttctttatccagtctatcattgataggcatttgggttggttccatgtctttgctattgtaaatagtgctgcagtgaacatacatgtacatgcatctttatagtagaacgatttatattcttttgggtatatacccagtaatgggattactgggtcaaatggtatttctggttctagatccttgaggaattgctatactgtcttccataattattgaactaatttacattcccaccaacagtgtaaaagtgttcctatttctccatagcctcaccagcatctattgtttcttgactttttaataattgccattctgactggcgtgagatggtatctcgttatggttttgatttgcatttctctaatgatcagtaatgtagagctctttttcatatatttgttggccatgtaaatgtcttcttttgcaaagtgtctgttcatatcatttgcccactttttgatggggttgcttttttcttgtaaatttgtttaagttccttgtaaattctggatattagatctttgtcagatggaaagattgcaaaaattttctcccattctgtaggttgcctgtttactctaatgatagttcttttgctgtacaggagctctttagtttaattagattgcgtttgtcaattttagctcttgttgcaattgcttttggcattttcatcatgaaatctttgcccatgcctatgtcctgaatggtattgaggttttctcatagggtttttatggtttagggctttacacttaagtctttagtccatcttgagttaatttttgaatacggtgtaaggaaggggtccagtttcagtttcctgcatatggctagccagttttctgcatatggctagccagttttcctagcaccacttattggataggagatcctttcctcattgcttgtttttgtcaggttcatcaaagatcaggtggttgtagatgtgtggtgtatttccgacrtctctgttctgttccattggtctatatgtgtgttttggtaccagtaccatgctgttttggttactgtagccttgtrgtatagtttgaagtcaggtagcatgatgcatccagcttttttctttttccttaggattgtcttggctatgtggggtcttctttgattccatatgaaatttaaagtatttttttctaattctgtgaagtatgttagtggtagtttgatgggaataacattgaatctataaactactttggtcaatrtggccattttcacrctattgattcttcctacscatgaggatggaatgtttttccatttgtttgtgtcctctcatttccttgagcagtggtttgtagttctccttgaagaagtcctccatgtcccttgttagctgtattcctaggtattttattctctttgtagcaattatgaataggagttcattcatgatttggctgtctgcttgtcaattgtttgtgtaaaggaatgcttgtgatttttgcacattgattttgtatcctgagactttgctgaagttgcttatcagcttaaggagtttttgggctgcgatgrtggggttttctaaatatagaatcacgtcatcacaaacagacacaatttgacttccttgcttcgtatttgaatacgctttattcctttctcttgcctaattgccctggccagaacttccaatactgcgttgaataggtrtggtaagagagggcatccttgtcttktaccagttttctaaaggaatgcttaaagcttttgcccatttaatatgatattggctgtgggtttgtaataaatagcttttattgttttgagatatgttcaatcaatgcctagtttattgagagtttttaacatgtagggatgttgaattttatcgaaggccctttctgcatctattgagataatcatgtgatttttttctttggttctgtttatgtgatggattaagtttatttatttgcatatgtttaaccagccttgcatcccagggatgaagccaacttgatcatggaggataagttttttgatgtgccagtggtttgccggtgttttattgargttttcacattgatgttcatcagggatattggtctgaagtttttttttgtttattgtgtctctgccaggttttggtatcaggatgatgctggctttataaaatgagttagaaataagtctcttcttttagttgtttggaatagtttcagaaggaattgtaccagctcctttttgtacctctgctagaatttggctgtgaatgcatgtggtactaggctttttttggttggtgggctattaatgactccctcaattttggaacttgttattggtctattcaggaatttgatttcttcctggtttagtcttgggagggtgtatgtgtccaggaatttatctatttcttctagattttctagtttatttgtgtcgaggtatttatagtattytctgatggtagtttgtatttctgtgggtcagtggtgatatccccgtcatcattttttattgtgtctattttattcttgtctcttttcttctttattagtctagctagcagtctatctattttgttaatttcttaaaaamcagctcctggattcatggattttttggagggttttccatgtctctgtctccttcaattctgctctgatcgtggttatttcttgtcttctgctagcttttggattagtttgctcttgcttctctagctcttttaattgtgtttttagggtgtcaatttgagatctttgtagctttatgatgtgggcatttagtgctataaatttccctcttaacmctgctttagytgtgtcccagagattctggtatgctgtgtatttgttttcattggtttcaaagaacttcttgatttctgccttaatttcattatttacccaggagtcattcaggagcaggctgttcaatttccatgtaattgtgtggttttgagtaagtttcttaatcctgagttttaatttgattgcattgtggtctaagagactgttatgattttagttcttttgcatttgctgaggagtgtgttatttccaattatgtggttgattttagaataagtcccatgtggcacagagaagaacatatattctgttgatttggggtggaaagttctgtggatgtcaattaggtccacttgatccagaactgacttcaagtcttgaatatccttgttaattttctgtcttattgatctaatattgaaagtggggtgttgaagtctcccactattattgtttgggagtctaagtctctttgtaggtctctaagaacttattttataaatctggctgctcctatattggatgcatatatatgtaggatagttagctcttcttgttgaattgatccctttaccattatgtaatgtcattctttttcttttttgatctttgttggtttaaagtctgtttggtcagagactaggattgcagcccttgctatttttttgctttccatttgcttggtaaattttcctccttccccttattttgaacctatgtgtgtctttgcacatgaaatgggtctcttgaatatagcacaccaatgggtcttgactgtatccaatttgccagtctgtgtcttttaattgggggcatttagcccatttatatttaaggttagtattattatgtgtgaatttgatcctgtcatcatgatgatatctggttattttgcacactagttgatgcagtttcttcatagtgtcattggtctttatattttggtgtgtttttgcagtgtctggtactggtttttccttgccatatctagtgcttccttcaggagttcttgcaaggcaggcctggtggtgacgaaatccctcagcctttgcttgtctggaatcacttcacttatgaagcttagtttggctggayatgaaactctgggttgaaatttcttcttttaagaatgttgaaaattggcccccaattttttctggcttgcttgtagggtttctgctgaaaggtctgttgttagtctgttaggcttccctatgtagatgacctggcctttctctctggctgcccttaacattttttccttcatttcaaccttggagaatctgacgattatgtgtcttggggttgatcttctcatggagtatcttggtggtgtctctgtatttcctgaatttgcatgttggtctgttttgctaggttagggaagtactcctggataatatcctaaagtgtgttttccaacttgtttccattctccctgtctccttcaggtattccaatcaattgtaagtttggtctttttacatagtcccatatttcttggaggctttgttcattccttttcattcttttttctgtatccttgtctgcatgccttatttcagcaaggtggtcttcaaactctgatatcctttcttttgcttgattgattcagctattgatacttgtgtatgcttcttgaagttcttgtgttgtgtttttcagccccatcaagtcacttatgttcttctctaaactggttattctagttagcagcttctctaatcttttatcaagattcttagcttctttgcattggattagaacacgctcctttagctcagtggagttttttattacccatcttctgaagcctacctctgtcaattcgtccatctcatccccagttcagctctgaacccttgctggagaggcactgcgatcatttggaggagagaagaggcacctggccttttgggttttcagcatttttttcattgattctttctcatcttcatgagtttgtttagtttcaatccttgaggctgctgaaccttggatggggttttttggggggacttttgttgttgttgctttctgtttgtttgtttttctttcaatggtcaggttgcgcttctggagggctgctgtctttactggggattcatttcaggccctattcatctggttcacccctgtgcctggagatatcactcaaggaggatggagaacaacaaagactggtgcctgctccttcttctgggatctctgacctcgtggggtaccaacctgatgccagtaggaatgctcgtatagggtgtctgacaaccgctataccagttgggtggcatggggaacaggacctgcttaatgaagcactttgactgttccctggtggagagggtatgctttgcctggggggaaacccacttgtctgggctgcccagattcctcagaactaccaagaggaaaggctaagtatgayggtctgcagagactgcggccacccttccccctaggggctcaggcccagggagatcagggttctgtccctgagcctctggctggagttgctggagttccttcagggaggccctgccccgtgaggaaggatgagtcagggtcaggcctgaagaggcgctctggccgccgtctaacacagctggtgtgtggggctgtggggggcacctctagggatgaagctgtccagcctccctggctctagcaggggaaaagcgtgacctggagctatagagagggatgctgcccttccccgacccagggaacttagcatgttaggcagttatgagtcccagtgctggctgtggcccctctcccaaggagctcaaatggctttgacagcaggcagccacagctgtggtgctgattgcccttcccccgggaaacttggctggcttaagcagattctagctgagaggctgttgagaatccgcaggacttcaaggttgggaccctatgccctggaggcatgggtccctgagtgggatcttctgatccatgggttgcatggctgggtagcaggctcactcaccgccggccttggctagggggtgggggcttccttgccccgtgtggctctcaggtgggctgctgcaccacactgctcttccttcctctctgtggatcatgccagcagcctagtcacttctgttgagagaatctggataccttgcttgctggtgcaggatttacacgctattatggttctttttgatgggagcctctgrttgcagctgcttctagtcggtcatctctcattatgttttgagttgccaaccacctgaaactttcagtgtttggaaagtttaccagccttgctgtaatttagtttcaggctattatggaaactaggacatttccyatgaagctgttgctttcctgagacccctttggcagctaccaacaggagcctgaagtgaggcaagcctggagttgtagttaagaccttggcgtaacctggggcttttcaatgtcattttgtaggttttcagctggcagttttggcttagtagttagagtgtttgcagtctcccttccttccagttttctcagaatccccttgagttttttggtagacttggaatttgagcataaatagaggatgtccaaggatatccatgattgatgtgaacggcagggattcagtgggagagagagagagaagggaaaataaaaactagcttccagcttgccattgaggctggttcctttgagcttcccagcttccctgtccccatgccttgggcaccctcccacacattatctggcttgatactgcctctaccccccatcctggaggaattcttctagaagttttgggtaggagcacaagttggccatattaccacagtatcacaaatgatctagagaaactgcaaaatgctttacaacttagaggtatgctgtggtttgaaagtcccatctgaaactcaggttgaaatttaattgccatcatgatggtattaagaagtaggacctttgagaggtgattaagtcatgaagactctgccctcatgaatggattaatgttctcttgggagtaggctggttttcacagagtgggctcctgataaaaagatgaaattcagtccccattccctctctgtcttgtgtgcttgtttgcctttccaccagatgccagcaccatgctctgtggcttcccaaccactagaacagtgaaccaaataaatttctgttcaccataaattatgaagtctttggtaattctattgtagcagcaggaacaagactataagataaggtaaaggaaggtcacgttttatttttatttttgaaaataaaatcaaactcggctctaagcctcactagctacggttaggggaagaattctaatattcatttttattggggctttttcctctctactgaatcatgcaaggaccttagcacttatatattcttgaacagtaaagaaagagcctggccttaagtccacggtgatcacattgtgaatatttctctatctgctcacagatgttccttttgggacctggtcctttatgctgtcaggttctgcttctatacttgtctgtggtgatgctcacaggatccttccccactgactgcatatttaaccatggcgatgccatgtaaccctccactctctccttagccctttttccccaaagcactcrcatgacttcccaggctctgggaatccaacccttagggaaaagacaagtctgtcttcctcttgttgcatcagtgtccagcttgtcctyctcttgctcaatctctcctaaaacattgtcctgttaaagcttcctttagggtaacagaaaccagccctcaaggatgcagatcccagctggctccctcttgagagtggatgggaagaagcctgaattcttttggctgatgagttcacaacaacaccccttcccccaacctttaaattaaaagtacgagaccaatttaatttatcaataactcactctattccagaatttctttagtcattcaggaaagaaaagtgagcagtagattttgaacactcttgactgcaacctgccataagaaacacacctctagccagagtgatcaagaaaataagtgaaaggacaaattacaagcattaggaatgaaagaggggacattaatgtagatcctggtatgcacatgtgtatatgtgtatgtgtgtgtccacatttgtggtaaactgaccaactgttaaaatgagggtaaaagacttgaaaacataaagaggagaaagggttctatactgtagtcagaaggcttaggttccagttatggctctgataataattttgagcaggtctataaactgctagggggctcagttttattacctatagaagagcctaacacatctgcattcataggccctgaggcccagaaggaatctcatatgtgaaatcatcgtatgaactatacagttctggttacatatgacatagttttcttatagttgttattattattagtggagcgtggccatagttttttgtcaaatagttttgaaagcctatctagacaaactgcttgagattcttcatattttccttttgacctttaaaacaaaacctctacagaggtttggatagaaagagaagttgaccatatcaaaataggtagaaatttcaaggatattttcctactgatgggcttctagatgcctaccaaatgaaagttttgatttctgccttttgcatctatttactctgaggagccaagaggtagagatttttcacttgtgtagttgagcaataacttgtgtataaaagtgctttccccatatggttcaggaagtcatagtgagatgaggagtgttaacactctggatgcttattgccatgaaatggtctatagggtgctgtagatgaacttgtccagagatgtgactaaagctctgggaagaaatgaccatgtgattataagggacataagctttataattccataaatttgtagttctaagcaatagcaaaaggggacaaaaattatctaatagggaatgtggactgacaaggctttcaggtcaacctcctgtattctggcttctcactctctagctcactgcttcctcagcttccagattttcaaggttactgcaccttctgtggtttccaayagctcatcattcctctctccccaggtggtgaatcaggagaggaaaatacaggtggcagaaaaattctggcaccttctcttttgctgttttacatatgtatgcacctattatgagcaggccccctgccatttggggaggtcattaaggtgtttacttggaataaatctgacaaacccctgcctgcttcttggttattatgatgtgtcagctttgatcagaggcaataaggacactcttctcctattcccccgagaatagcaggtgtattatcttatggggttttctgagtacagttagaagcatcctttggcaatgaagtaagtatagctctgtgctagaaggaagataagtgcatcaagtcttctacaaattgaatagcatataagcatgacattacagttgtaggtgcagaaataaaaggggaaatgcattgactaagatgctataaaatcatcacatgaagtttcaaagcaccctgtagttccatcccacggaagtgtcatatttaaggacaataccttaattgtgcttatgcctttctaatgttttaggaatcttaagggcttggtctaagaaaattctttttaaagtctctcattgtttctctttgtagtatcccaatttcctgagatttttctcatacttgagtagacctctttcacccatgccattttttccctgccatcttggtctcttagtcatgcacaactttgtgtgatggattgctgacaagtcacatctttcccctgggcaaagtctcactgggggtagaattcttgcctctgatgacagttctcttcagaatctgtctgtatagttttcattctttctttcctcagagagctggggacaaagaagagaagctaaaagggcraaggaattggggaatgaagtctcctacatttataattgtatcccataatgattaaactgttacactattgtcgaccaactatttggcagattgtctaaagttgttggcattttggcttatattttctttttttattgtactttaagttccgggatacatgtgaagaatgtgcaggtttgttatataggtatacatgtgccatggtggtttgctgaacctattaatcagtcatctaggttttaaggcccgcatgcattagctatttgtcttgatgctctccctccctcactcccctcccctcaacaggccctgatgtgtgttgttcccctccctgtgtccacatgctcttattgttcaactcccacttatgagtgagaacatgcggtgtttggttttctgttccagtattagtttgctgaggatgatgacttccagcttcatccatgtccctgcgaagaacataatctcattctttttttatggctgcatagtattctgtggtgtatatgtaccacattttctttatccagtccatcactgatgatgggcatttgggttgattccatgtctttgctattgtaaatagtgctgcaataaacatacgtgggcgtgtttatttataatagaatgatttatattcctttaggtatatacccagtaatgggattgctgggtcaaatggtatttctggttctagatccttgaggaatcaccacgctgtcttccacaatggttgcacttatttacattcccaccaatagtgtaaaagtgttcctatttctccatagcctcgccagcatctattgtttcttgactttttaataattagcattctgactggcatgagatgatatctcattgtggttttgatgtgcctttctctaatgatcagtgatgttgagctttgtttcatgtttgttggctgcataaatgtcttttttttgagaagtgtctgttcatattctttgcccactttttgatggggttgtttattttattcttgtaaatttgtttaacttccttgtagattctagatattagacctttgtcaggtgggtagattgcaaaaattttcgcccattctgtaggttgttcactctgatgacagtttcttttgctgtgcaggagctctttagttcaattagatcccatctgtcaattttagcttttgttgcaattgcttttggcattttcctcatgaaatctttgctcatgcctgtgtcctgaatggtattgcctaggttttcttctagggcttttatggctttgggctttacatttaagtctttagtccatcttgagttaattccaaaggtgtaaggaaggggtccagtttcagttttctgcatatggctgggcagttttcctagcaccacttattggataggagatcctttccccattgcttgtttttgtcaggtttgtcaaagatcagatggttgtagatgtgtggtgttatttctgaggcctctgttctgttccgttggtatatatgtctgtttttgtagcagtaccatattgttttggttactatagccttgtagtatagtttgaagtcaggtagcatgatgcctcctgctttgttctgtttgcttaggattgtctatggggtcttctttgattccatatgaaatttaagtagttttatctaattctgtgaagaatggcaatggtagtttgatgagaatagcattgaatctataaattactttggatagtatggccattttcacgatatttattcttcctatccatgaggatagaatgtttttccatgtgttcgtgtcctctcttatttgttgagcagtggtttgcagttctccttgaagaattccttcacatcccttgttagctgtgttcctaggtgttttattctctttgtagcaattgtgaatcggagttcattcatgatttggctctctgcttgtctattgttggtgtataggattatcttttctcattaggactatttggtcttatggattttagaaattagaaatataataagctcaactttgcaaattttggttaaaaattttctcagaaaatataccatctgagtagggaaaaacgactactgccaatctcatttctcaatatagatgcagaaattctaaaagcattactaaattgactgtagctatatcatgaccaagtaaatatgccagaaattcaaagatggttcagtattagaaatttatttcattactagataaattgatgttaaaaggtaatatttatttctaagtaatctcataaaattagaaataaaaggacagttatttttaagaaacaaagaatacaatgagggaggatttttgctattagaaaaatatattataaagctataacaattaaaacagtgtgcatggattcacatgtagacagacagagatgaataaaacagaataaagagcccagaaattgagatagatatatatatataatatttatatatgtaaacataataaatatatatatggatccaaatatatccacatccatatatatatatatatatatatatatatttaaggacaatatatttatattyataaatataactcttccctcgggtggaactacagggtgctttgaaacttcatgtcatgatttgatagcatcttagtcaacccatttctccttttatttctatacctataactgttatgggggtgctcatatgctattcaatttgtagaagatttgatgcacttaccttccttctagcacagagctatacttacctcattgccaaaggatgctcctaaatgtactcagaaaacctcataagataatactgctaytcttaggggaagaggaggagtatgtctttactgcctctgatcaaagttgaagcatcacaataaccaagaagcaggcaggagtttgagatatatatatatatatatatatatayacacacacacacacacacacacacacacacacacacacacacatatatgtatatatatgttttatatgtaatcaagaaagctttttaaggctgagcatagtgtctcttgcctgtaataccaacattttgggaggctagggcaggatgggagaattgcttcaggccaggattacaagaccagcctgggcaacatagcaagatcccatctctaaaaaaaaaaaaaagcagctagatgtggtggcatgtgtctatagtcctaggtacttgtaaggctgaggcagaaggattgcttgagctcaatgttgccatgagctatgattctgttactgcattccagcctgggctacagagcgagaccctgtttcaaacaaacaaacaaactaaaaaaagaaaactaaaattaggtttttaaaattggtcaggaagggatagttatctcaataaaatgtgttgcagccattggcaaaatatttgtcaaaaatgaagttggatcatttatcgttcacataataaattttggaaaaataaagaaaaagaagaagaggagaaggaggagggaagaagatgaaaaaagatgaaggaagaggaaaataaggaagcaggagaagatagaaaacatcattttggaggtgacaaaggctgagtaatgagggctctccagcaatctaagatgagtttcccaagtcctgggaaaacccacaagagatctcatgtccatcttgagagagacacgtgctcttcaatacaaggattcccttatgattctcagtgtgtttagaaagtttaggtttctaatggcccatctgtttgggaacagaattatggtttcacaactgaaggataatattattgccacaaatgagttaaggcagaattgtaagtaactctcactttgtgtgaagataccaaaatgagactgggagaacatcaaggaaaatcagcttcatttatttgaccatctatattatcttgcagagtgggcaagcaggtaactgatgtggatttcttactgaattttgttttgtctacccttcttctctttaagacagtgtgagttacactcttatggcattcatatactgattcataaagtgagctaccaatctccacatagtaggggtacaccttcagcatttccaagctttttttgctcacaatctgccttattagctctgaacttagttctagctgctgtctgactatggtccagaggtctcctggtctgaatctcagtttccccaacagacattgacctggtgggctcctggctcccaacacctctgtggctccagargaatccaaatcccaaccatggttccacaatcccaggctaattggttgtgatcaagctatccttgcctgccacctcatcccacccctgtttcctgcaccatctcatgatgggggaaggattctgacaagtttcatataaccaatcctttgtaccttacacaattttgtgtctttaaaatgctatgaatgtggtactattctttagaagattttagaatctgtgttcaaacctactgtctttagtgtctcagaaacagattcttatcatcacttcacatctgctcctctgctcaaagcttgaaaatctagggatggtgaactagttatatataattttggtacttactgatttaattttcttatatttttgcaggcttttaagagttttggtccttatgagcctgatttggaaaatgcccttgagttttctcttgaaaagagacaggaagacccgagtcttttaagatgggaatagctcctcactctcagaagccctgttttgccatctggtttatgtgaaaccctcttccctgctgtggtatgtctgtgaaaggcctcactatcaagtttaatttgtgtcagtccactgcctccccttgcattccctaacagcaccctccaatttgtgaaagtatgttcaatgtgagatgtgttcaatgtgagagtatgttcaatgtgagatattttactggtagctattttactggtagatattttcatgtatctcaatgtgagatattttactggtcaccaatgtgtagttgtgctcagagctgctctggagtttttgaaatttctctggggagttcaaggagaattgtagtttcttctcaggcaattaaagtcatcttccaataagctcagttgttacttcccacctgcctctgatctcagaattcaaygctcagaaaacaccacccatctctgtggcttaatcagagggaagtctctgaaaggctgctaggttggtggcagaagtaccatcttgagggatgatgattcattggcatcttattagagtggtgcatagactgaggttagtccttcaatgatatggtttggccgtgtccccaccctagtttcatcttgaattgtaactcccacaacttccacgtgtcatgggaggaacccagtgggagatgattgaattataggggtgggtctttcctgtgctaatctcatgatagtgaatgagtctcatgagatctgatggttttaaaaacggaggccaccagccaaggcctaatgtcctagaggagatacctgcacatggagagaggatgggtacaatccttctgcaagggatcagacagtaaatattttaggctttctgggacatacagtctctgtggcaaccactcagttctgctgatgtagtgtgaaagccaccacagaccattcccatggttggattccaaaaaatgttatttacaaaagcagtagcaggctggatttgacccatggccttagtttgtctacccctgagctagaggaatgctagaggtcttttccaactccaaaatgctgttattctctgaatttaaaaaatcatctctttcaaatatatctaagttgaacatcccaagtccatgtgcagaaatagtacatttcactttgagtttattaacaaactctgttgaccaagtgagttctttgtttcatcttgactgtgcagtatttttaaaataatagcttctcagaaaacctatgcttatgccatgaaaatctttaaagacacctcagaggccctcttccctctaaagaaaagaaaagaaaagaaatgaaatgaaaagacaaatcacctgttattctaccaagcagagagagcagccatggtgaagactttgttgaatagtgagaatcaaaatctctgctgcgtgcccttccagacttcttcatttagaccagtgattctcagctgcrgacagttttgcctcccagggacatctgacaatgtctggagacattttgggttgtcatgactggrgagttactactggcacctattgggtagaggccaggatgtggctaaacatcctacaatgcacaggacagcccccacaacccagaattatccaatttaaaacatcagtrgtgctgagkctgagaaatcctgattcagacgtattagatgggctctctgtgcttttttaaaaaaacaaarttggaatcaaaaatagattctattttgccatctcttcccttgctcagtgataaacatctgtccttacatataaatccatctctctgtgattattaaagcctatgttatccctttcttcatatggctctaccatgatttaaataatcttttttaaaattttcaaatatttagtttttatctagtttttctggccatcataacaacactatgagggggtcccttgtcataaatatgagtacattttgttaattttgtaccctcagtgactcatgctgtgtccagagaagggtgggccctcagtaaatgtacctgaatgccgagcttccatttttcttcattcctttgctcctatagtatttgtggccaattttatgcatgttcttttggccaaaggtccttattttacctgaagtcctggagtgaaggccagatgaatcagaatatatatgtgccaggggtaaggctgaactgacaagaaggcacgaatattggcacagaagcttgtgttagctggcatactgtactgagtgactcagataccatttacaatctccatgctctggcactgcttgcctgcctgggtctgtaggcatggaccaggccagagggcacttgggcttatatctggcaatgtgaaattcaggaggaaaccatggctrgattttccaaatcatgaacattcatgcagtgcacctyacacacttattagaacaaggaaggaacaatttcatacgggttttgtgtcaaatgttggtctttgtcatggtacaggtatgaaatgagtgcccaataaatgtttaggggaggattgaggttgtggtattttgaatctctagaattttcttctggaattatggcctgggaaatacttttaacttttactgtgtcctggatggattttctaattttcttatttttttctatttctccttctgtgtgtgtgtgtgtgtgtgtgkggttttttttctgtactctatggaagactttctcaacctgtatttcaatgttttgactgaatttttaattgcttttatcatattcttaatttctaagacttcttttttattcccttctctcaatgaaggtaaatgtgatagtttctgttgtttttgttgttgtggacaacatatagttaggtcttgctttttttttttttttttgtcttgcttttttatccatgctgacagtctctgttttcaaattagcatatttaagtcactcacttttaaggtgattactgagatagttggattaatgtctaccatatttgtaactcttttctataagtctcccttctgtgtttcatttttatcttccatcttttttgtcttctctggttttaatttagcattttacaaaattttattttattttttatcttagtatattaattatacttaaaaaaatttctttttgattgccctagaatttgcaatatacatatacaacagatccaaatccacttttaagtaacactctactgcttcatgattataatagagaattcccaatcatccctcctgtcccttataagattgctgttactgatttcactttttcataagctatgatccttaaatgtatgattactattattacttttaacaaacttttatttgataattaagaaaaaagattttatctcgtcttcatttatttcttctttaatattcttcctttccttatgtagatctgagtttgacttgcataattttctttctttctgaagaaattattttaacatttctggcaaggtaggtctactggtgataaatttactcggtttttgttcatctgagaaagcctatttgttcttcacttttgaagagtaattttgctggctacagaattctaagttggtattttttgactttgtttgctttttttcattcaatgctttaaacattttacttttctttcttcttgcttacagggcttctgatgagaagttcaatgcaattcttatccttgttccactgtaggaacagccattattactttaaattccttccttccctcccttgctccctccttctctcccttccttctttccttcctttcctccctcccttccttctttccttcctttcctccctccctccctccttccctccctctcaccctacctgtctctctttgtctctttctctttttctcatgctggtattcttgctacacatatattataccttttgtaattgtcctaggttcttgtatattctgttctatctttttttttttctttacatttcagttttgaaagtttctagtgactgacatatatttgagctcactgattctttccttggccatgtccattctactgatgagtccaccaaagtcatttttcatttcttttacactgttttttaaaatttatttctggcatttcctttttttttttttcttagagtttccctctctctgcttacattatccatctatttttgtatactgtccgctttttccattagagccattagtatattaattttagttattttaattccctgtctgataattgcaaaatctctgccatatttgagtctgttttttatactttattacttcagattatgtttttgtcttttagcatggcttataattttttgttgaaagccatatatgatgtatcagataaaagaactgatgtagagtctaattctaaggcctaattcttgaggaattgggttgccttattgcaataaaatttcctctaatgttcttgtttctgtctctctggttgtttttgagttttcctagagactccttaaatggggtctgcggcttggagttcttttagctaaatcccctgttattrtacaggagccctgttgatgtggtggtaaagtatggagggtrgtagtttttttaaagtttccatttccttaaaaaatctctttcctctcagtttctcccctttcccacttctctctatctctgtctctctctaatctccatctatttcattaygtattttttgtcagatgtctggcgtttcctgactgctcatatttaagagaaggacactagaactctagttgtaaagctgggcatagtggcttgcacctataatcccagtactttaggaggctgaggcagtattgtaatcccaatactttgggaggctgcctgcttgaggccagggtcatgaaaccagcctgggcaatgtagcaaggcccaatctctgcaaaaataaataaataaaagattagccgagtatggtggcacgagcttgcaagtctcagctactcagaacgctgaggcaggaggatcgtttgagcccaggaggtcgaggctgtagtgagccatgatcagagcattgcactccagcctgggcaccagagcaagaccttgtctctaaaaagaataaaactaaatacaagtaagtaaaactccagttgtaagctgtatacatggatagagagaaaatggtgggggtggttcttatggattgtgggcttctctgttatctagttaagctgttttggggcagaatttctaatatagtgtagttggacttttctcttggactggtctaaattgctaagaaaaaaattttccagaccaggtgtggtggcttacgcctgtaatcccagcactttgggagaccaaggcaggaggattgcttgagcccaggagtttgagactagcctgggcaacacgcaaatacaaaaaaaaaaaaaaaagtcagatgtggtggtacatccctgtagtcccagctgcttgggaggatgaagagggaggatggattgagtttaggagatccaggctgaatggaagctggacgcttatctgccaacattctgggagctaacggggaagaggagtgtatgtccttctccctccagagatgttctactttatcatccacaaagactaaaccttcagtcttattgggataaggaaattgtctatctaggtggaataggtcactgaatctagatatctgattcttcatcagatttttacccaattttccatttccacctttctcttccagaggaccatgttgctaccagttactgtgcattttaatttttccatgggtctcctgaatcagttattactcatctctttgcttgtcaggttcctaaatatttttgctattgtatcttctctcattttctttgtttttccaggcttataccttaaaaaaagaaaattatctcatgtcccttttattggaaatttaggagagaaagggggtaagtgtggtttcttccatcaccattagctagaaatgtgccttttgtctccatttcccactatcccgttggtcaatgcaaccatggaatttttgagcatgctgagatcttcttttgtagtttgacccttattttcaccagcttgggagacatgaagtttttaaccacaattcatatgggaggactttggcaggttcttggagctaaaaatatatatctattttttcctgaagccttgaagaggaaaaccaaattgagttcagatctcaaagagatgtttgaagggttccttctgccatgcatttgaactggatcattagtcacttatactttggacgtgaccagtataaattgcatggtgagtcatagttcagctttggtcctttttattttaaattaatatagatttatcaaaataatacatgcgtgtagcaccgttattgctttctttagtttagacataatccattgacctcctcttctggtaaacaaagattcagtttccttagaccaccagtcccatttccccactctgtatcctcccagtgtatttacattatccattggcctccatcgtcaatatttagtgtgtatatcattttgacatgggacccaaaaaacagaaaatccaaatcaggagaaaagtcaagttgagccctggggagagcacatcctctattgcttcctgagaaaagggatacttttctttttcgaaaacttgcatgtcttaaaatgtctttattctactcttacatttgtttgaaattttagctaggcataaagctccaggttgagaaatattttgctcaaaacaaggcattgcttttgggtttttgtattataattgagagctatgattctgattctagttcttcttatgccaactgcacttttttcaccctctctggaaacttcttagtatattctctctagttctggtccgaactttcatgatgttgtaccttgatgtgtgtcctatttctctttacactgggcagtgtgaggacccttttaatatgggaatttatgtcttattcttggaaatgttactgcactattcctctgataatttatttccttctattctcattttgctccctctggaactcatctcagtcagatgtctgagcgtaattgattgttttctcatttttaaagatcttttgtattattttccatgtctttgtctttttgtcttcctttatgttagacttttttcaagctcatctctaccctttgtgttgaatctttttatttcttctaatgtacttttcrtttctaatagctctctcattctcttctcctattatttgggtagcatcctattcttgtttcttctctgcaataytttatcttatcgctgtagatatcagttactctttttctctaaaagttcatctcttccctgcattgtattgatttttcttccaggttcctttttgttatttgtttttgactcatatcatttagaaggcttttcttaaatgcatgacaatcattgtccgtttgtatttaagagcattacaagctaacagcaagccctctctatgtgggtgggtcttgtcgattgttgggctttcctgtttcctgtagggcagttgagcaactttttagtcagtctctttttggagaatcatgaatggtacattgtgttattttctctagagctcctcagtttctcaagagaagaatgttttagtctgctacctgggcataagtgggtgggagaggcatccgtctggctgccagcatcacggggataggaatgcaggctaagacctctgtcctccagtccatcctcacccctactttccactgaacttgattccttcaagtcttgggggtcttctcagggttctgcagtgagaatcaacaaactcttatttagcagagtataggcatttagattatagcattctcttctctggtagaatagccatattttaccttctcccctcccttttctgcttccaaatatctgttgaaatttctcactctctaatgtcttcaccacattctttttgtctccttttattcttataggatattgcatgagatagttgaggtgataaaactctgaacttaattgatgttatttaactgacaacctctggacctgtgcttttagcccaaggaattctcccttatttgtaagtggcaactgagtttcagctggccaaagcaggagcccctctctctctattgaatagaatatggttttatgtgggttgtcatgcactcctaagtcatctggggaagcctcacaattctggcttctctatgtgaagcaatgccaccgaggccaagggagagctgagaggcctccgtgtatgcatgtacagagtgcaaaatgcccataataaaccagcttctccatggcctgctcttgggagcaggcaagtggccagtgcctctgccattagtctccaggagacaacaccaggaacacaaagactaaacagcattcacctcaaaagtcatcctttgtgcctttgtctcccatttggcagtgtgccatgctgtagaagcagttgtcactccagacctcccaggaatgagttttatttttcctggacaattgcctcttcctagataggaaagaaagcagggaagggaattgacatttaatgagggaggcatcatgccaggtgctttatataggtttgctaacctcattcttgtaacaaccctttgaggatagtattattactgtcacttcacagataaggaagctgagtttcagggaggttaaatagcttgccaagggcatggcagctgagtggcagaatagggatttgaacccaaatatgccaagcaaaaaaactagtagacctccagtatatcactctggatgatgttctttgaggtttctttccattcccaagaaacctcaaagaaaccatgctcttttttaagtgtgtacccaggagggcctcagtcaatgtggtttgagggaacaaacaagacggaagaaggattctgcctttctaactactataagatcttcaagaatactgatagggtttcgatgttttgtctccaccaaatctcatgttgaaatgtgaccttcaatgttgaagatgggcctagtgggaaatatttgggtcatgggggcagatccctcaagaatagcttggtgctattctcacagtaataagtgtgttctcactctgtgagttcatgtgtaatctggttgtttcaaggagcctggtatctctctctttctctcaccctcactctattccctcactcactctattgccatgtgacacactggctcctccttcaccttccatcatgattgtaactttcctgaggcccccacagaagcaaatactggcactatgcttccacatcttcaggtatctttatagaaatgccccactactttgtaccaattttctatgttagtctgtttgtgtcactataaaggaataccagagactgggaaatttataaagaaaagaggtttatttttggctcacggttctgcaggctaagaagcattgtgctaacatctgctcctggtgatgctttaggaagcttccaatcattgtgtaaggcaaagggggagctagcatgtcacatggtgagagtgggagcaggagaggttgtataaggctcttttatacaaccagctttcaagtgaactaccagagtgagaactcactcattaccatggggacagcaccaagtcatacatgagggatccatccccatgacccaaaaacctcccaccagacccacttccaacattggagattatatttcaacatgagatttggagggaacaaaacttccaaaccatagtaaataccttgaattataggtcatggtttcaaagaatccagaaatccaaacacacaaccaactttcaattgtccttggccaagaaatatatcttgggtatccggtattacccaaatcaaatttttatcattacttttaaggccacgtgtggggaatccctgtgagaagaactttgctggttgatgtcacatctgtgtttgatgtgacaggttgacctccttttgctataattttcaaaagaatgttttagaaatgaacaaggaaaagaacaacttatattgagggggcaagcaaatttagatctgggtcttgcttcttaatttccagtatggtggtcccatatttagcaaggggggtcagtgtgggaagtgacatcaaaggtgaccaaaacattcaatgggtctgatctactgtgctatgtggaaattccagtagttgtatttaggccaaagtgatggtgaattgaatcaaccctttcttacaggcatgtttgtccagttctttttttttcctctggcacacttgtttgaatactagggagaacatggaaacacatctggccttcagttggagtgcagcttgggtctaaatttttcatcaaagagaaattcaggagcaggaaaacaggtgtgtacatatctgtgtgtatgcacatgtgtgtgtataggtacacgtggtcatctcatgcattgcctyagataccatttgatgttttgggctgatttattgggcattcttattgtggtaagtaggtgggttatgaatgagtcagtctaagttaaaggggaaggctgatcaatgtttgactctaacggcatttacactgccttagccaggactgaagtaattacatggctttctgaaaaattcaagtaattttcttgaatgattttccatatcatctttactatttccttaatttaatagagattggtagcttaaagcatatggcatgagtgtgtaatttaagggaaagtagattaatatgccaccaggcaaaagtttaatttatggcactggatgactaatggggacaactagaactatggatttatttttctctcaagcatagcagaatttattccacttatttttacaaataagaaattattctttagaaatgtcatagtaaaacagcctggagtttgttgggacatatagaaatgttgatttccttcattcttccctcccttcctttcttctatactgtcaataaaaactgaaaagttgccatgcactacctgtgctatgctagacactgggcrtgggatggagtctaagggactcttctctgacacagattcacttgctgtggggataagcatattaccaaaaaatgctttttttcaatgtgagtgcagtggatagttgaaagtagaaaacggggatgtagaaggtacaacaactgcttttatgttggtgatgctgacaatgaggggtgggggcatgggaaagtgaaggtcagagaggagctcactgaaggggtgataattgagttaggttgaaggaaatgtcagagtaaagcagaggaatgggtacccatgtagagagtgggtgttgggagagaggaggcattgcaggggcctctggcccatggaaagagcatatgtaaaggcatggtgtatggtgcacttgagtaaaggcatatgattatagtctaggaaacgtaagagtgatgggagatgaggaggctggaactgtaggcatgggaggccttctttgccatgccaaggagttccgacttgatttgcaaataaaaggaatccagagaggtaggtttgttgggtttttaattagttaatgtcctcattatctaactgtataatgtacaaggacttgtacagaacatgaaaaagatggcaaaaatataaaatgttagaggtgaaaaggacctggaatatctcttaatccaacatttttcttctagatgacaacattaacacggaggagtaagacataggtgaagacagtgctttgaggaacagcacacagttatgtattggaaattcttagaagtaacatcctatttcctcattcccctgaaggttctttataatggcaaagataacatttactcctgtaggtactttctattattgaaagcaaataatctgtgtataactttcttttttagaaaataaactatttttggggtctggcttatttagtgtattttacttcatttttttcatgtttatataacaatatttgtaaatctctctacttttgtttcatcttttctgtgtattgtcaagagtaaccattgttgctatagcaaattttcagaataattaattgctgtcccccaacattttaaaattatttatttttaatgtggcaaaatatatataacatagaatttactattttaaccttttgagtatacaattcagtggcattaactacattcacactattgtgcaaccatcacctctatccatcttcagaactttaaaaatcatcctaaactgagactcctgtcctcctcctcagcccctggctgccaccattctactttctttccctgtgaatcctcagcatttcaaatgaaaaatttcaaatatatagtcaaggtgatagaagagagatgatggggatgatcccagaggaaattacttgaaggcctgctgcaggcccaagatatatgtctggatgtaccctagaaagtccacagggtgcataaacagaaactccaacaaaacaaaaactttgttcagctaaatatctccaacgtaataaagtaaaaagagtaagagctttggaatcagttaaatgtggattgtcagtccagatgtcctgtgtgtctacctttctacttatctttctttactttgattcacgaaggatttgatgtggcttgcaagaaccaaagaaaaaaatagagattaaataaaatccatgagcagggattgtgttaagatcattagaatttgagtttcctattatttttaatgaaggacaaatataatcacttatatgatttctctgtccttaaagagaaaggctcgccaaggtcatataaccttgggcaaatcacttaacttttgggaacttcatctataaaatggagaaaataaatgattacccgcttcagggttgtggtgaaaattatgtggatttatgtcttttttttttttttttttgagacggagtctcgctctgtcgcccaggctggagtgcagtggcgcgatctcggctcactgcaagctccgcctcccgggttcacgccattctcctgcctcagcctcccgagtagctgggactacaggcgcccgccaccacgcccggctaattttttgtatttttagtagagacggggtttcaccgtgttagccaggatggtctcgatctcctgacctcgtgatccgcccgcctcggcctcccaaagtgctgggattacaggcgtgagccaccgcgcccggccggatttatgtctttaaagggctgggcacagtgtggcacatgggcactcagcattattagcacctttccttatcttgtgacttgtgttcctattaagagtaccataggatgaaggcttactttcgttaatctcattaattgaggttttagtgcttctagcaactacgcttttctgtttacctacccrtttcccagtgtgagtctcagttacacatttttatcagtgttggctgaggctagctgggaggcttcatcattttttcttttaaaatgcaccaacaaggtaaggttatatgattaaaagaaaataaaacaaaacatccctctcaccatgggatgctttgtctggtggctyagagcattttctctctcatttatagttctccaagtatcggcaatgaagttggagccgtgatctactgacctttgagggccagtcagtgggcagcagacaaaattgctgaagagtttactccagctaggttattgaatgtttcctccagttatttaggcatctgagccctggagttgggttgtcatttggcattccaacttgctgtttggcactttggtcttctgacagccccaaatcccagatttactcaacctagttaattcagtagctatatttaaatgttgtgatagttaattttatgtttcacctttactgggctgtgcagtgcctagacatctggccaaatactgtactgactctgtctgggagggtgtttctggatgagattaacttttgaatcagtaaactgagtaatacagattgccctccctcatgcaggtaggtctcatccaacaaactgaagatctaaatagaacaaaaaggctgagtaaggcagagaacctctcctccctgatttaagctgggacattggtcttttctggactggatgtggatggaaatattagctcttcttgagtcctgagcctgctggcatttggcctggaccatcaccattggttctccagggtcacctgtttgcccattgcagattttgggacctcttattttccataatctttgaaccaatttgttataataaatctctttatggctgactgttgatctgtctrtctatctatctatctatctatctatctatctatctatctttctatcccctactggttctgwttctctgcagaaccctgactaatacaaatttgtcctggaccaggacataccccagagcttgcagtagaacaattgcttctatataaataaaacataggttatgtgcagaagacatagtgggatgttttccatgccatagaaacacaataattttaagacatgttttaattgcttattattatgtaatagtgttcatttgattcttaatacagccccacaagacagatttagaactgatgaataggagcagagccaagatttgaacccaggtatacctaattcccaatcctatagtctttccaccatggtaagattgacaagatgtcaggggaaataaacagtttattctcttgacattttatgcaccctatggccctacaactgaagatttaaaaagtttgttttggagatactttaagattttctgtttagcattctgttgtctgacttcaccctctgacgtgggctttaagaaacattttccaaaacgcactagttcttcctctccccggctttggttgaagtrcactgcctgcttagtgaatgaatgagcatgaaggtagagtgcagttcccaaagttatactgggagcacatcaatgcttcaagatgatccataaaaggcagggctgagtagagttttccatggtccatgaagtcttggaaacactgcctgctgtaccctattttggaggttcataatatgctgtagtaagttaaagctctcagatgtcatgtagcaaaggtaccatcttaatattttgtaactcagcatttctataacttatttgagcaaaggccatgtttgtgatgccaatgactaattatatgcaacataatattatgggaaatattggcctaagcatggggtcgatgttgggacttggcacctgttgagactggagaggagctagatgtgggggacctcacatcattctgtaagtcgactgcytattctgcaggcagtgttcagttaggtctagtttggggtaaaggcctggacagtatattcacatcgcgtaaggatagtcaatgtgtgaggcaccctgtttctcaagttcaggaaacagagaagcacccccagcagcagctttctaattctgtaaactaaactgatgaagattgcacatgctagaagcagcatatttggtatattgaaaggatgaagaaaagccacacatatatttgaggcccaaagtgggctggagaaatataataagaaccgtgtgtccctcttggcattcccttggcccaggttagggctggtatgattctggccaacccatatacctctgcagctgcaactgagacagtagcaaagggtgaaccagttttagcaaggaaggctgctaagtgtgacacatctcaaatgccattgtctggaaggaagggactgaggattaaggcaggagtccatgtccggccatggaagggtgctggatctgcctgtcatgggcacataacctgattgttgtctgacttcacactgtttttccctctgacaagggtctgcccctcatcggaaatgccactgatgggatgtctggttgctttcccaagattttcagtcttcaggcaagctgagcatggaacattgtttttgagaagcaaggctgttttttttgtaatgaaatagaatgattcagcaagcatttattataaatttcctatatattctagaggacacattgagtctgaccttggccttcaaggagttgatttatagtctagaggggcacattactttctatagaaataaggaccataaattagtggaaagatatgcagatcttagcaggggctgggagagggcacaaggaggagtgttccaaatagtggggaagaggaaggtatagctagaggccagagctgtgaaggagctgctcatgctaagtgaactccaagcagtgtggttggaggttagacaagtttgcagggctggtgaggagatgggcaaaacaagagatggagctggagagaaggtgggggtcaaggcaaagacagcctttgtgccatgctatgtatctgggacttcatcctatgagtaataggaaaccactgaaagccttaaaactgggagcccatcatcacgaactcactgctgaatggaccgctggactcttccttagggagatgagggcggtccttgcacaaacgagtaaagaaataatgatagagcttgggactcagatttagttgtttggttggcactctcttagccactctctgaggctgtttgcttatctgttcaacaataactgctgcttctctttyacagcagtttgtcaagttgctctgaaatcatatatgtgaacttgtttagcagtaaagggagaaagtacttaaagtagtaaamatccacataccctccgctacagtcaagcaaaatatcatgtgcttcctcatgtttttacaagcacaaaatttccctcctccctcattcaataatcagaagatagtgtgactaaagataaggggttgagttcttggtgtgggtttttgagaggaggtgggctggaggcagctctggagaggacagcatcttttccttactctttgkggcatctcttccctactctgtattcagtgccatcatgttggtagcttggaattggctacagtgggccacaggtatcagtaaatgctacaaataagagtttcttcccccacttccaatcttgagagccagttgttagacatttaccagcacacctatgccatgggggacacttgcgagagtaagacagtgataggcagagtggctcacacattcctgctggagaagsaggagccctttaccatctattcctgggtcagtgackcattcaaccttctctcccttttgggtattatccctgagattgagaggtgatccagagggttgttccttcctgtgctcctggcctgtggagagaagtgtagagagggcccatctgrtaaagagctctccttgccagcactgtcccagagcacacagcagctttcagygaggggttctggcccctggcacagctgggctagctgctcaaagccacagggtccatggcaacacttcaactgttttggcttattttttgcaactagtttctttgaaccatgccaatgagactccttgaagacagggctctttgccaaatgacaaagtcatgtaaagataacagccccaggcctggcccaatgttggcataagtgtttgtgggaggaatgcatgagcagggccagcaaatggtgcaacccaggctccggagaagtaacaccacatttctaagcagttgaatcttatcccaagccactgaattcattgacattccctcaacaagatactgggccagagtccttgggtaaatgagtcagcagtataaattacaatgaccaaagcaggagatgcagttgacattttgcagcaaacagatgcaaaagggaatgggattttggaaacacaagtgacaagcttgctttgagagtcagctggaagaggtgatcctggtgtggggttgaatgtttgggaaaatggggattaatgctctgcagtaaattctcaccaaggactccactcttgtgactgcagaagactggccattaactaggtgggaaagagcttgctcttctgaaaggtaaaccctctaggcagtcattctacctacccttctatgtattcttgaaatgactgcactttctatgtgcatactttagtttaatgagacagatagggtgatcgtcttgttctggtttgccagagactttcttgcatttaaacctgaaaatcccatgaaccctcttagtccccagcagacaggatagcctgtcaccttagagacagctgtggtgaaagctgtagtttgaagttagacatctgtactgactagtggatcactttgggccaattgcttgcctttctaaactttccttaggaaaaaaaaagtaataatgctgaattcacaactacawgttgtgtagattcagcaagacagtgctggtaagaatactcaacatagtgccttgcacacagtggatgtgcaatacatttttttccttacaaaactatagtttttgtrccatcttggcttttccattttagtattttaaaaggcaagccctgaaagcaagtaagtgggagacttatcctctgtaaaaacctttggtaatttctgctttaacctcccatagactatcttcctggctgagcagtgggatctggaagggacctccagattcactcttgattgtgttcagagctgatgrctcaacatgttcctggcagcctaggctagccagaaatgcctgtgttttttatgtagaggtcgggggacaggagagaggagccctggcctctcaatcttggtgtcagatttgggtcactgggaagtcagcatctgcccagagctcctagctttagaaagctgtttgaggccccagggtttagtgaccagcagggctaggtccaggtaacccagcatccagtagtgcaggagagaagattatgcagcctccgacatgaagggagggaacatttcaaagcacacactttactcacaaaactcaaatccagtgaaaaacatgctctttaaggaactctttccttcctctttttctaacaggctacacagagtaagtctctctctctctctctctctcatgaacaaaaggaaacatctttggaaatggcaaaacatcttattgtttctctcagattggccttggagccttgggaatcagccctcaggcttctgccctcttagaacatagggatgagcctgaacatatgttggttttgttccttgggccaaaaaccttggagtcatctgtaagtctactcttctctcacgtatccagaatatacttctctctgtttccatggctaccgcctgactgagccaccaccatcttttgcctgggaactagatgtagcctcttacctggactttcccttcctgcccttgcccctatcatggtctattctcaacccagcagccacagtggtttttataaacggaagtcacatcatgtacctgctctgctccaagtcttgcaatgagtcctcatttcactctgagtaaaagcccatgcctttgcagtgactggagaggtaatggtttttgcttagcctccattttctctccagcgtcatttcttattactctccactggctcttccaactccasctacattagccaccttgcttcttgaaccaccagccatacttctgcatttgaggctggttcctatgccagcctctaatgatccggctgttgccccttcctgacttactcttctgctcacttgctcaccttctttgaggcttkgctcccatctcaccttcttgatgaggccaactctaaccaccctgatgaatattgcaaygtgtccttcctgctccatatactccaagtccctgaccttactttgcattttttcccacagctctggtcgccaatgtagcacattatttggttacctattatgttcatgtcttttatttagtctcagagaagattacatctaaagttcattgaagcacaggggaaagttgcacagaaagacttgagttcaaattccatctctcccatttattccctgtctgatttgtataagttacttaaccatccagaggctcagtttcctcatctatgaaatactaataattaattcattcaaggagtattcaataagcactactgctatgaaaggcattggagataggtgaatatgaaaggcacagtccttgctgttatgcagctgtaaagaggatgtaatgcaagaacacatataacatgcctggtagaaaacaaggcatatatttggtgctcattaaatagttccctttctgaagaacttgaatatatctctgttagttatctggccccttttagtttatgccattttcttgtaatgctaaaaagagcaaactaggttaacacacacatcgcatgcacacatatgtgctggcttgcacrtcattgaactgcagcaggatttttggggaaggcagcttttggatggtctccaggagggtccaagagcctcctaaaatatatgcaaatcatagtataacctattttgttcaaataggtagagacaaagtttgtaacttttatcagattcttaaagggtgtccttgatacatccatccaaggacatctaaaagggcatccttgatccatccttgatccaaaccgtggggtttcctttcccaaactccattattggtctgctatctgggttttcctaaaacaacgatttgaagtggaaactctgaaataatgattaattccagagtggaagatggtttttggctgatattggtrctgaggcccctgcttcctgggtggtgagaagaaagcccgygcatgtcaaggtcattgccttctaagtccctggtactgctggaatttagaggcttgctcccatgtagataaaaccacccctgagatggctgggaaggcagcataagaaatgtcagcacaggtgttaggaatgcctcattaatctagggtgagyacagatcacagagggcagagccctttaggcactcagcataattctrtgctctgatttgggaagcctgtgaaaagaagggagataaatgtaggagtgttgttattttactattttttwakttatgttattaacagtmaggctgctggctcacttagctccatgcattattttcagctgtgtagtatttaatccaagctcccttgtcttcatttccatgcattgtatcaggaaaacattttcttttgatttcttgcatctgttgctagatgcaagaaataaaaactagataaaaggaataggataagtttaaaagacaagaaaatggtaccaagaaactatttttgtcctgccttagtgaagcaggcaagtaacatttttactgtggtctcttgactccttgtggagagaaggaaaaatgctgttgaggcaaaaacaagaaaatggattgtggtgatagagagtttcccagatatgtgatttgtaggtttcttatctggggtccctgactctgcttccaatattccacacattgctcagcatgcttggacattttcttttttcagtggaaactcttgtgaatacagcattgcctccctgtaaaagctgtgcagtatgcactccctgaggtctcgggaaccattatagcatggccgtgcagaccctcaaatgaatgattgaagcagttcctatcacgagaactgcgggttcctttttgtttcagcattgccagtgtctgcacttgtagccttcgactagtggtttcctctctgctttgtctcctcattctcaaatctttaaagctgcttaaagatagcttgacgtggttggtaattgcaaaatcatagtaccattgtcagagggctttgagtcagagggctgtttgttgatcagacacagagctagcctctcaactcacaccaaaatacctacttctgagaggccccagggttctgtargtcaatgacaggctttagttcaaatccacttctactacctactatatgaccttgattgagttacttaaagcttcwatgtgaggattttctaggatatcatgcttgtaaaaaaaatagtacatacaacataccaaaaataaatagtactatacttctattactactactgcatgtgttggtagcagtatttatgtttagggaaagaagagactttgcgatatgccctctggataccatccagggttaaacctgccctttcagtatcagtgatggctctgtccacacatggcgtttgagagctatattttggcaactgttcaattactcagatagctgaaaaatatgtcagccwtgggtcccagtgcattattgatgttggctgttttctttcaggtgcattgcacagtccttgcytgctgagagcaagaagggtattctctcttctgtcccttggaggcaagttagagtgccaccccgctccaaaatgttccttcccttcaaaggtgaacagcatgagtcacatctggtcatccccgtaggttatttccttgcagcctcttctccgcactgcttctttcctgaaccatttcacgggtggctcactggagtgagcctgtcactaaagacaggcgagtggctcactggagtgaggtcagaaccgcttgtgcatagagggattttcctctgctttgcaaacacccagcgacatcacacagccttgsgagcgccatcaattgcaattgttgccagcaaagcgtcgtctgatgggatattgatttggcaccgtgcttagcagcagctcggccaaatggggcctcctcaccactgcagggctccggccgccttggcggactaggcagattagaaargcccggccccaaatacttgcggttgccaagcgaggtgggctcagccagcagatctgtatttcaggcagcacaaaaggattcggtgtgaggctgttaccaaggtgcccagaatcatgccttcaagtgtacttttgaagagcaaactctgataaactcttaaatttaaacacctgcttaactggtattaaaaaaaagtccaatcactacattttcggaagtctttttgccttgaaatgttctgcagctttttttaggagctttttttcttcctttttttcttcatgttttaagtgatttatgatgatgcatttattagtagtggtttccagtgcgagacagtaatggtggaaggtaggctatcaytgaaatgctattcaaatttataataaaattgaatgatgtaagttttcctgccaatattttgacataaacacattttcttttttttattttttatttttttattttattattattatactttaagttttagggtacatgtgcacaatgtgcaggtttgttacatatgtatacatgtgccatgctggtgtgctgcacccattaactcgtcatttagcattaggtatatctcctaatgctatccctcccccctcccaccaccccacaayagtccctagagtgtgatgttccccttcctgtgtccatgtgttttcattgttcaattcccacctatgagtgagaacatgtggtgtttggttttctgtccttgtgatagtttactgagaatgatgatttccaatttcatccatgtccctacaaaggacatgaactcatccttttttatggctgcatagtattccatggtgtatatgtgccacattttcttaatccagtctaccatggttggacatttgggttggttccaagtctttgctattgtgaatagtgctgcaataaacatacgtgtgcatgtgtctttatagcagcatgatttatagtcctttgggtatatacccagtaatgggatggctgggtcaaatggtatttctagttctagacccctgaggaatcgccacactgacttccacaatggttggactagtttacagtcccaccaacagtgtaaaagtgttcctatttctccacatcctctccagcaactgttgtttcctgactttttaatgattgccattctaactggtgtgagatggtatctcattgtggttttgatttgcatttctctgatggccagtgatgatgaacattttttcatgtgtcttttggctgcataaatgtcttcttttgagaagtctctattcatatccttcgcccactttttgatggggttgtttttttcttgtaaatttgtttgagttctttgtagattctggatattagccctttgtcacatgagtaggttgggaaaattttctcccattttgtaggttgcctgttcactctgatggtagtttcttttgctgtgcagaagctctttagtttaattagatcccatttgtcaagtttggcttttgttgccattgcttttggtgttttagacatgaagtccttgcccatgcctatgtcctgaatggtaatggctaggttttcttctagggtttttatggttttaggtctaacatgtaagcctttaatccgtcttgaattaatttttgtataaggtgcaaggaagggatccagtttcagtttctacatatggctagccagttttcccagcaccatttattaaatcgggaatcctttccgcattgcttgtttttctcaggtttgtcaaagatcagatagttgtagatatgcggtgttatttcttagtgctctgttctgttccattgatctatatctctgttttggtaccagtaccatgctgttttggttactgtagccttgtagtatagtttgaagtcaggtagcgtgatgcctccagctttgttcttttggcttaggattgacttggcgatgcaggctcttttttggttccatatgaagtttaaagtagttttttccaattctgtgaagaaagtcattggtagcttgatgaggatggcattgaatctataaattaccttgggcagtatggccattttcacgatatttattcttcctacccatgaacatggaatgttcttccatttgtttgtatcctcttttatttcattgagcagtggtttgtagttctccttgaagaggtccttcatgtccctggtaagttggattcctaggtattttattctctttgaagcaattgtgaatgggagttcactcatgatttggctctctgtttgtctgttattggtgtataagaatgcttgtgatttttgyacattgattttrtatcctgagactttgctgaagttgcttatcagcttaaggagattttgggctraaacagtggggttttctagatatacaatcatgtcatctgcaaacagggacaatttgacttcctcttttcctaattgaataccctttatttccttctcctgcctgattgccctggccagaacttccagcactatgttgaataggagtggtgagagagggcatccctgtcttgtgtcasttttcaaagggaatgcttccagtttttgcccattcagtatgatattggctgtgggtttgtcatagatagctctkattattttgagatacrtcccatcaatacctaatttattgagagtttttagcatgaaatgttgttgaattttgtcaaaggccttttctgcatctattgagataataatgtggtttttgtctttggttctgtttatatgctggattacatttattgatttgtgtatattgaaccagccttgcatcccagggatgaagcccacttgatcatggtggataagctttttgatgtgctgctggattcggtttgccagtattttattgaggatttttgcatcgatgttcatcaaggatattggtctaaaattctgttttttggttgtgtctctgactggctttggtatcaggatgatgctggcctcagaaaatgagttagggaggattccctctttttctattgattggaatagtttcagaaggaatggtaccagttcctccttgtacctctggtagaatttggctgtgaatccatctggtcctggactctttttggttggtaagctattgattattgccacaatttcagagcctgttattggtctattcagagattcaaattcttctttgtttagtcttgggagggtgtatgtgtcgaggaatttatccatttcttctagattttctagtttatttgcgtagagttgtttgtagtattctctgatggtagtttgtatttctgtgggatccgtggtgatatctcctttatcattttttattgcgtctatttgattcttctctctttttttctttattagtcttgctagcggtctatcaattttgttgatcctttcaaaaaaccagctcctggattcattaattttttgaagggttttttgtgtctctatttccttcagttctgctctgattttagttgtttcttgccttctgctagcttttgaatgtgtttgctcttgcttttctagttcttttaattgtgatattagggtgtcaattttggatctttcctgctttctcttgtgggcttttagtgctataaatttccctctacacactgctttgaatgcgtcccagagattctggtatgttgtgtctttgttctcattggtttcaaagaacatctttatttctgccttcatttcattgtgtacccagtagtcattcaggagcaggttgttcagtttccatgtagttgagtggttttgagtgagtttcttaatcctgagttctagtttgattgtactgtggtctgagagacagtttgttataatttctgttcttttacatttgctgaggagagctttacttccaactatgtgtgcaattttggaataggtgtggtgtggtgctgaaaaaaatgtatattctgttgatttggggtggagagttctgtagatgtctattaggtctgcttggtgcagagctgagttcaattcctgggtatscttgttacctttctgtctcgttgatctgtctaatgttgacagtggggtgttaaagtctcccattattattgtgtgggagtctaagtctctttgtaggtcactcaggacttgctttatgaatctgggtgctcctgtattgggtgcatatatatttaggatagttagctcttcttgttgaattgatccctttaccattatgtaatggccttctttgtctcctttgatctttgttggtttaaagtctgttttatcagagactaggattgcaacccctgcctttttttgttttccatttgcttggtagatcttcctccatccttttatcttgagcctatgtgtgtctctgcacgtgagatgggtttcctgaatacagcacactgatgggtcatgactctttatccaatttgccagtctgtgtcttttaattggagcatttagtccatttacatttaaagttaatattgttatgtgtgaatttgatcctgtcattatgatgttagctggttattttgctcgttagttgatgtagtttcttcctagtctcgatggtctttacattttggcatgattttgcagcagctggtaccggtttttcctttccatgtttagtgcttcctttaggagctcttttagggcaggcctggtggtgaccaaatctctcagcatttgcttgtctgtaaagtattttatttctccttcacttatgaagcttagtttggctggatatgaaattctgggttgaaaattattttctttaagaatgttgaatattggaccccactctcttctggcttgtagagattctgcagagagatctgctgttagtctgatgggcttccctttgtgggtaatccgacctttctctctggctgcccttaacattttttgcttcatttcaactttggtgaatctgacaattatgtgtcttggagttgctcttctcgaggagtatctttgtggcattctctgtatttcctgaatctgagtgttggcctgccttgctagactggggaagttctcctggataatatcctgcagagtgttttccaacttggttccattctccctgtcactttcaggtacaccaatcagacgtaggtttgatcttttcacatagtcccatatttcttggaggctttgttcatttctttttattcttttttctgtaaacttcccttctcacttcatttcattcatttcatcttccatcactgataccctttcttccagttgatcgcattggctcctgaggcttctgcattcttcacgtagttctcaagccttggctttcagcttcatcctcctttaagcacttctctgtattggttattctagttatacattcgtctaaatttttttcaaagtttttaacttctttgcctttggtttgaatttcctcytgtagctcagagtagtttgatcgtctgaagccttcttctctcaactygtcaaagtcattctccgtccagctttgttccattgctggtgaggaactkcrttcctttggaggaggagaggcgctctgctttttagagtttccagtttttctgctctgttttttccccatctttgtggttttatctacttttggtctttgatgatggtgatgtacagatgggtttttggtgtggatgtcctttctgtttgttagttttccttctaatagacaggaccctcagctgcaggtctgctggagtttgctagaggtccacttcagacgctgtttgcctgggtatcagtagcggtggctgcagaacagyggattttggtgaaccgcgaatgctgctgtccgatggttcctctggaagttttgtctcagaggagtacccagccgtgtgaggtgtcagtctgcccctactggggggtgcctcccagttaggctgctcaggggtcaggggtcagggacccacttgaggaggcagtctgcccgttctcagatctccagctgcatgctgctctcttcaaagctgtcagacagggacatttaagtctgcagagtttactgctgtctttttgtttgtctgtgccctgyccccagaggtggagcctacagaggcaggcaggcctccttgagctgtggtgggctccacccagttcgagcttcccggctgctttgtttacctaagcaagcctgggcaatggcrggcgcccctcccccagcctygctgccaccttgcagtttgatctcagactgctgtgctagcaatcagcgagactccgtgggcgtaggaccctcagagccatgtgcgggatataatctcctggtgcaccgttttttaagcccgtcggaaaagcgcattattagggtgggagtgacccgattttccaggtgccgtctgtcacccctttctttgactaggaaagggaactccctgaccccttgcacttctggagtgaggcaatgcctcgccctgctttggctcgcgcatggtgcgctgcacccactgtcctgcacccactrtctggcactccctagtgagatgaacctggtacctcagatggaaatgcagaaatcacccrtcttctgcgtcrctcackctgggagctgtagaccggagctgttcctatttggctgtcttctgaatttttcyccacattttcattttgatatgaatgttgcttctaaaagccatggttattaaataaatctcctgaggttaccagcagtcaatgaccagccctctatcaataaatccttaaccaagttagatttcactatggaaggcagaggggtttgaaaaggtcatgcaytaaaatttcctctcttaaccaactaattccaccwcattgtttgagatgatgaatctggcaataaatgaagagaaaaagtggtcaaaagtcccaggtaatagcagcatccttaggaattgctgagcattgatctggcagagtgattagattctgataggttgaattctgtgtagaataggagtataggaaatatccagttatcagtaggaaactccatggcaaataagtctgatttcagggcaggatgcagtgggtacttctgctatgttatatgaatgggtgagaatgggactgattttcacaaatgctctttatgcctaggtaggggagggaaagtattaaatgaaatatttcttaaaaagagactcattgattcagaagtctctgttggctctgcccatagtgaaggcagaatggtttctaacakggtcttaattgacttgatgggagctgttttcaaggactcagcactctttcctttcaatgctttcattaaaattcccaagtgcttcctaaatcccattgaggagaacaattttcatttcttcatttacatttagctaaggcagcagggaagccacatagctctacgtgtgagagtccacctgtttccatggcggtactggcagcacataagcagtttgagagtcttttgctaagattggctttccatgttaattacttttaaattgtgtccctaagtttctatgcctctccataaatcaagtcccactccctgctcatagaagccagtttatatctcaggagtagaaatatatgcacatgtcaacttctgatgggtctgtcagtctaagagtgaaggattatgggccgagtcacagtgccttcagggtcttttttattagcaagaatctgttaaaagcatgtgggtggaaggcattcatagatatgttattcttttatattcttttattctcctgagtattaaaatcctttcacttctgagaatcacagggaccagcatggaccatttagatgtccccaaggacaattttgaaaacactgtcaggagtagttaatatccctcattccccttgtgtgctgagtcacatgaaaagtaacatttcacttatctggagggtgcaaggaacagtaattctccgccagatagctgaaaggtgcagytaatcagataattgaaaattaaccctttatgcactgaaaggtaactctggtcagtgctttttgcstttccctgagtagctccacatcttcaggtctagtagaacactcaagtttgtgtccatgtctgaggtttgctctttgagtataatgtatgtgctaggaatcactaactttgtgccataaatgaaataaatttcacagtacttgtctgagaagcccaattggtcattggtcaattggtatgttaggcatagggggttggagggaaggtcagggggacaggggacagtggtgaacaagacttttgggatctctgccctctagaagactacagttgaatgggtccctaaatctgtacccaatatttttctgttgtccccacccgcctgcctcctgacctcatcacaggccactctccccttgccacattgctcctgccacaacttagctccttataagcccttcaactcctcaagcttctccctgcttaataatctttgcacatgttgttccctcttgtcagaaatattttcctcctactcttgcctgttaactggctgtctccttttccttcaggtcttagatcaaatgtcacctgcttgtggaggccatccgtgaccacttgggtgtattaaagatggctgcaartatctgtatcactccctccccacaccctgcatcaagaggtggggtttatttcttctgttgaatcagggctagctctgtgattgctttaaccaacccagtgtagcagaagtgatgttgtgccggtcctaggcttagcccgtaagaggactggccgctcctgcctccccactcttggcacacttgcacttgcaatctagctgccatgtacaggagcctaatttagctacatgctgagaccacgaggagaaaccgtgtggagaaagagagaggtctcagccttccagctgtccctgccaaagcaccagacatgtgagtgaaaccatattggatattctagcccgggttgccatctggctacagctgcatggcagaccccaaacaagaccaacagaagaactacctggccaacccacaggatcatgagagagaaaaattggttgttttaaaaagccactgaattttgaggatagtttgttacacagcaatatagctgaaatgccaccctatttataaataaatcatattccttttgttctctgcactgcaccctgtttttcttttcagcaccctttacctttacagtgatgcatctgttgttttataatctgtttagtatctgttttcccaattagattaaagatccatggtgcaaaactggagtattttaattgaccattgtatacctagtatcacagagtgtgcagcacatagtaggcactcagccaatgtttgttgaaygaatgaatgaatttaaaaggttccagcatttatttgttttgtgagatcatttccctccagatacagagaaaagaatctgtaaatcttcacctttggtggcctttcaaaaacaaccttcgaaaatcctgtttttaaatccttctttgcaaatcaaacttccactttgcatctcctacacacctgctcaacagattttaatgcttccctattggcaagagtataaagccttagcattttcttttttttttttttgagagagtgagtcttgctctgttgccaaggctggagtgtaatcctgtgatcatggctcattgcagccttgacccctgggctcaagcaatcctcccagcttagcctccctagtagccagggccacaggtgtgcaccaccacacctggctaatttttaaaaattttttgtagagacagggtcttcccatgttgcccaggctgatctccaactcctagcctcatgagatcctcctgcctcggcctcccaaagtgccgggattataggtgtgagctaccatgcctggccaagcctaaactttaatacggtagtccaggccccttcagtctgcatgtatagccgttgcccagtgtccctttcttgaccctcttacacccatcacatcaggttctctgttattatctaggctgctgtggacctttccactttcctggagcctttcttctctacttctaccaattccccaagagacctcctttcttcaagaagcatttaccaacagcctatgctttttagtgggcatcttttcttaactgagcaaaccattgaaccagtcctccgttggaagtgggagccattcttgatcccacagaaagtttagagacagtggagcactgggctgggagttcagggacatcacttctggtccaagctctgctgccaacttgtgtggtgactgcatgtgattgagctgctcgttccttatctgaagaattaggagcttggataaagatccctttcagctctgaggtttttccatattcaaatttgctttacagtgataggaagaacaacccgctgatttatgtacctttgggtcagaatttggctgacttgtagcatcagcagttttacgtgaacaaaaatttcaatttcattagtacagccaagttaattatactgggttggcagtgtattctgagaggcagaatgtccacggagccagaagtcaggaggcctgcactgtcttgctgccctgccactagctggaggagagcagaccagccggagggaagctggcagacttcttggaccttcaccacctcatttctaaactggaggtaataataataataaagtatgcctgtaatcccagcattttgggaggccgaggcaggtggatcctgaagtcaggagttaaagaccagcctggccaagatggtgaaaccccgtctctactaaaaatacaaaaattagccgggtgtggtggtgggtgcctgtaatcccagctactcaggaggctgaggcagagaattgcttgaacctgggagggagaggttgcagtgagccgagatcacaccactgcactccagcctgggcaacaagagcgaaactctgtctcaaaaaaaataaataaataaaataaattaaaaaagtaaataaagtgttttcattcacttcaggtttgttctgagggattaatgtatgtaatatagcaatgatttgataggtcattatcaaaatgtaactgaaagaaaattatcggtatatctatttatcaagataatacaggctttttctatttaccttgggtgctctgcccacccctagatccctttatagtgttccagtttctgtccctttgtgtcctgccagatggatgagatggaagaagcactactattttatgagaacctccaatgtacaaggcactggccatacgtgattttttgtttgtttgtttgttttttaagatagaatcttgttttgctgcccaggctggagtgcagtggcataatctcggctcactgcaacttctgccttccaggttcaagtgattctcctgcctcagcttcctgagtagctgggactacaggaatgtgccaccacgcctggctactttttgtgtttttagtagagattgggttacaccaccatggtagccaggcttgccttgaactcttgacctcaggcaatctgcctgcctyggcctccaaaagtactgggattacaggcgtgagccactgtgcccggccctgttttttttttttttctccttacaacattcctataaggaataattgtattattagttggcattcttttagttgtcagtaacataactctgactcaaactagtttaagttaaaaaaaattggtggggtacatttattttgttcatataacctaaaagtcaatgggcattctggcttcaggcatagcaggatcagggggctcaatggaccctttcacattgtttttctttgtctctctagttcttctctcagctttttctgtgttgatgtcatttttttttcttttttctttttttctttttttttttttttgagatggagtctcactctgtcgcccaggctggagtgcagtggtgtgatctcagctcactgcaacctccgcctcccaggttcaagcaattcttgtgccttagccttctgagcagctgggattacaggcgtgtgccaccatgcccagctaatttttatatttttttcgtagagatggggttttgccatcttggccaggctggtcttgaactcctgacctcaggtgatccggccacgtcggcctctcagagtgctgggattacaggcatgagccactgcacccagccctgatgtcatttttctggtatattctctccacatggtgaaaagataaccccatggctaagataacttcaagccatatggcttgtttctcaaagaaaagagaaatagaccatctctttcctaggggccacatcaaatctcccataaggaccagatctgtttcagtcacatatcaccccctggaccaatcactctatccataggtatggggtccatggttctggttggacaatctaggttatgtctattatagtcaaatctggcctgcgggggcagactcaggttttcctgcagcttttttgggtccgtgaaaagcttggttagcccaggccagactaaccatgcctctgttgatggaacattagggtatgtgagcattggaaagggatccagaggtccctgagcccaacccaaccatggccaaacaagagaagggtcttatcctaggtggcgtggtgaggcagtaccactccaagtcctttcctttgcctgtgccacctctatcggaaggattatgtaagcttctcttgtgggagcaactgaaggatcctggcagagagaggcgcagaaactgtgggtcacatgcagactacatcgggctgcccctgagctgccctatctcttctatctctttgtcttctcacttctctgggccactacttggtaatgtagttgagattctggctattcagagccccatttcagaggggggctagagtgggggtacctctgggcttagccagtcctctgccttttctttcacctcttttttctagggaaggtggttcctgagacagagtctgccccaaattataaaatcaaacagaaaaagacgtcagagggagaagcagggtaacagtgtcgccaaagaggcccctttccccacaaaggaagccagtgagagagaacagcctctgttgacagaacattrtgggggccgcctcacatctggtgtgggcggggaggaggggctgctgtgcctggtggtgctacttctgatgtcctaaatgtgtctccagaatttccccctcaacagactctcttcatgatgccactgccaagtcgtkaaaaatggatcaagggcataggctggcttcatggaggtcaaagcaagtagtcatcatctcatagctgaaagaaaaaaagctttgctctttctgatttgcctattttcctttttctactcttccttgtttgtaagcggaggagcttgtttgcagttggtcactggatttctcttctgcagccctggttatcatttgcaccatagttgttgcatgctcctgtggcagcttcctggagagctgacctctgtgcacaatgcccttggcatattcagggcagcaggtaccctccacatgtggccatgcctctcactgtttagatgtgcccatggctccctgacatctataggagagagcccaagcttcttccatgacaacaagagaatggctgatcattccagcattttctctttctgttccgtgtcacattcacagacacaccacacaaaacgtttgtggattgcaggacaccctaccygttaccatgtttctgtgcctcttttcatgcagtgccctctctctggaatcacctgcctccacccacctttcatgcaaacaatttctactccacctactttcaagatccagttcaaatgtcaccttcactatgaagccttcctaatttccccacagcatgaatgatcccctcatccatgctcctgctcctttccgtaccttctctattatatacctctttactagagtttttgcgtgtctgcagggaggtggtatagcaaaggcaagagaacatgagctttgccttttggtctgggtttggaacctgctgtgccatgtattagctgtatgtctttgcagaagttatctgaccattgggagccctttctgtctttacttgtaaatgagcataattaaactatgctaaagtattttgttggggatgaaatggatcaacctgtgatgtgcctgccatggtgcttggcaaatgatagttctcaaaaactggtagggtggtagatgtggttattgtgattataaatgaaccatgaaatcttagcaatgaaagagaccaggggggtcattctcatgccttcaaagcctgattcctatttttttttatcagattaacatctagcttccccttgaactctgggacaggtagctcactttcttcctaatcttttgtgatacttaattctgacagtgcagaggttggctagtccatagacttagttactctgtgtgaatttgcaggagtactttaaattgttggttatatgtatgtatgcatgcatacatgaatgtatatgtgcctgtgcatatatatatatgtatgtatgtatgcatgtctatatgcatttagtgatgtttgaccatgtaatgtttcctaaacagttttactgaaaaatctgggttaggaagaaacaaaggaaattaaactgtaaagcaaagwtgtgagtggctttgtgttttcttagaccttttgtttccaggtctatttgcatctgtttctttttgcttgcctctgagcagaatgctagtagaaattgtggcttgtggtgttgctgcaactatcaagcatactttggctgtgatagatgaagagagaacacaatctgagtgacgtagtaacatggtgcatctaaaaatagtagtattttgttggcagagagaagacaaagttgttttctaatgtggtttaggagcaaggaatccttagttgttttgtggtattttggcctcagttttctcatctgtaaagtgggagcattgggcactaagagctggggtaaagaggaggcagaggtggactctgtacttgagaactaactacttcccttccccattcaactggagccactctatctttattttttaaagctgagttatgcatttgagttccttatattatttaaaataaaatattctgttgcttcaaaaatttgaaaacctccaaactgtgttgtcttttgggctccttcctgctctaaagactattatggctgtagataaagcaaagttatatttttcctgactttctaatacacattaattttgtaagaaattttctcaaatgaaacaaaatctagcttcaaaaacttaaaaaaaatgtttttgctcttttctctctgatttgcttaattgcagcaaaagtcgatttctttcctttttcttccaaaatttgcttttctctgacaatcaaaattccactaagagtaggaaaaagtcatagatgtggtatggagtgaaaggtaagtatcatgcttaatattcctttgtatattttcatcctaggccagtacttagagaaactatgacatagttaaaatgtgaattcagcattattcgtctctcttttcagcaatttctttttccaagtctctccagatgacctcaatgaatcataaagctgaaaacaacataaaaatatttttgcctaaatgtatcactttatagatgtggaaaatgggactctgtgagggggatgtatttgtataggataaggtaatcagcyataactyaaactctggtcttttctagttcagttttctctctagttggtctaggaagcctcctggtgcttcagttttcttactgtaaaatggggatgataataatagtatctacctcatagaatagtctcgagtattacatgagagtagaacacttagaacaatgcttgggctatggaaagtttctgacacttgtttgctgttattatcattattgtacttccacatggtgccagcaggctgcccaaggtgcacacactaatggaaataccccatttggggaccatgctgctgtcttccattctcaaaacacgtcactataaaaatttcctcttgtgacattctatttccccagggcactgtttctctgctgggtgacactggaagggtaattggttttattcagatagatgaactccatgttaaaatattgcttaatgttaccattgcctagtaataataccttaactcagtgaaaatatatgcgcctccataaaccttaaaaggctgcctttaatggggcgacttcagakttacctggcaggtgagtaggtaagtcgtttttcatcaaacaggtcttttgtcttaccttgagttactaccttctctgctagaatgcatggggccagccaagcatcctcatcactctcacctctaagttctggaaaatgaatgccaattatgaagtgggtgagcatttatgatttagagaccattttattcctttgttaaggtcaggtgaatggaactttacttgagcagtgaagagaaactagtcctcacttctaagtttatcatgcttttgggaagcaggtaatcatctaatagataggaaaataattctgagagtgtgatggaaagaagtattacctgtcattgaggaaaaatactgtatagggcatgccccaccctgaatctcaggaaccctgagagccaggtttgaaatagcccctggtggtggcttcacctagaaggaagtttgacggacccttctgtgatgtcgcttgcaatcatcttgggcatggattcccccagtctttggttcctctcttcatctgtcctccctccctgactcccaacttcatacctggtcccgttcttccagagcattctaccttattgacattgttcwtgaactaggggaaccctgacagtgagttgcagctttgtggagctgaaactttgtcaccatccacagccgcccagccagcacccaggagggaccctcttgagtagcgtgtgatattgatctgaagaaacttacctcctcactatkggtatattttctccttttcttccgcacaagagagagagatgggggtgrgggggtgaaagggagggagrgagggaatgagggaggagagagagcgcgagcgagagagcccctttagcaagaaaacatcaagagtttttgagtgtggtgtgtggttcccttcgtccccatcagtcgcttcaatatttcaaaatggatccggttctgtggcgggtgcgagagtgaggctgtgggggacctccaggcccaacctccgcgaagcctcgcggcttctgcgtgccctggccccgggaggataaggatttcccttccctcctacttgcgcgcggagccgagctcttgttgaggtgagggttccggaagcccacgcagctccgcaggtcggtggtggccgcggctgccctgcgggggtgagtgtgcccggccggggtcggagcccagcgtgtgcccggcagacggcggtgcccgcgcgcccctccctccgcgcccgcggtgacagcccagacaccagcccgggcgctgacagacgacttttctcacttgtcagttttctcgcttgtcagcagagctgctggtaagtgagagaaaacagaggggcgcgaaggcaggcgcggccagggagtgagcggggcgctgggcgcggggcggagccgggtgcgcggcgtccgggtcaggccccaccgcccgcgccggctcccgctttgctcagccgccgcttttctctcccttctcactttctctcctccccacccagccctccttttcacctccaaaccctttagctgcgcgcygatcgcttctgtggctttgtttgggggtagggggagaatacgaatagacccgaggtgctttctcttggagctggagtccaatcccaatccctatctctatccctatccctgtgcttatccctgggcattagcccgggaccatggctggttcccgcagctgcctccggagcgcacctgrggccatggtttgccgcgatcggagtccgctctaagtcggagtctgggggcgcagaagggggagcgcgccgagaaagtgccsggcaaacgcgcgccgcgcctggctgggcatcgcganctgggcgaggagacggggagkggacagcccaaactatctcagcttcaccgccagtggtcacctacctgcagctatggagtcgccaaccaaggagattgaagaatttgagagcaactctctgaaatacctgcaaccggaacagatcgagaaaatctggcttcggctccgcgggctgtaagtatacctatttacttctcctgccccatttcccgctcccatccttattttaccacacagccgcagtcacgactgctcaccctgttcctgcatgggcctttaaatacaaccctagaagttccacaactgctgctctgttaattacagtcactgctacttttcttccaacacagagagggttgtctttctgtcttagaatgccttgctgttccaagtcatgcttttttggggggaaggagagatgtcctttgatgagtcagttatggtggcccaatactcaatgaggtgtttctgatcctttttgcccagggagaaaagtttgagacccagacagggacttttaattgaaggaagaatttttctctgcaaactgcttgcatacacttgggcaggtggtccaagaacttaccaacagttaaaattcaacatgcattctggctgctacatttcttttttccctctccttagcccagtcgaacttctgatatttcctggggttctttttggtggagaaatgtttactagaaggaaaggctcttgtggagaaagggggggcagaaacgatattggggttttcttgcaatatttgaacaatgaaatagagtggccagaattctagttgccctgatggatggagatctctgaatttcattcacttcattgggttctgtctgtttttgggtactgaggagaggtgacctgaaaatacatggtattttctgtaaaaatatttcatcatcartgaactgctggtcactccagtcaggagcttgagggatagctgtatattcacagcttgctcctcagtcactgggcaggtcccaaagacaccttccatkactactagatactactttcatcagtcatttggcatcagatatctagtgtggtttaaaaatatggcttttctccaagcatattctctagacattctgtttctaacaagggcactgatgggaaaaccagcttcctgccagtttgtttgttttgctgctgttattgtttttgaaagcacacacacaaacaaaagacaaataaaaaatgtgttgatctaagttagcttgatattcaaagtttctaaggagaagcattaaggtagtatgtgtttctttaaggggtccttattgacaggtgcaatttataaaagccattccatatatagtccaagtgagcttcattgccattgatttcaatgggaaaccatgccaaataatttgatttttgacttgtctagccaccgctagtggagactgtaaatttatttggaaaccttgtctctggctggcaggctttcctgacagtttagatgcctgcaacgcagcagctctcggagtggtgtttacagtaatctcatgttatatttagtgaacattacgtccgattgtattgtgctgcacacagaaagtttgttgtgtccacaaagtctgggcccaaagtgtataatgtgaaagcgttgtcgagctggattccttgccatgctgactagagggattcatatccatacacccaggaacttcttctcttggactgcttttcaatttaaaccgactccatggagacatttgggctagagacaagtgtttggtcaaatcagcaatgctgaggcgggaacttgtgtggaaaagcattagcacttacaacactgcgtcgtgtagctttctcagtttcatatctgctaggcttctctctccaaggtgttgcagtgtaatgtaactacattttcattttctagtctcttgtatctactcagaacctagtgcttttgaacatgaaaagtgtggggtgattatagcttcactttctaatttgaaaaggagatgctattatttgttattattatacatatttttaccagtatgtgatccttaccacttcttcttcttcttctttttaaacataacagcagtgctagaataaatagctaaagactctggaaaccaaagcacacactcttttatacaacttggwataacatttttgcagtccacaacttggaataacactttgccgtccacaaaatagaaacccttaggggaaggaagggtgtgtgcatatttgtccacacaacagattgtcagtaagagaaaggaagctgctctttcaacattttagaaagcctcaaaccataattggattttcataccaatatattaccatgacacctttatagaaagggctctgtaggtgaccacagatggtcaggaattcagttcagcttgtctgagagacatctcacttcaggatgtgatcatcaactcacgcctggattattcaatgttatcgcatctccttcttgttggtatcgcccgtatttaatttattgttgaatttttcatctcctccattagaatgtaagttccatgaggacacatacttactcactgcaatacctagaacagcatttagcacatagtagatgctcaatcaataggtggtgaagcataaaaacccaaatgtgagcttttaaatattcaaaatgaagataaatatatatttaggacagcttatggccgtgagacctgtcaacacaatgagccatgagctagctaggatgcaggttttattaacatcattgcccaggttggggcacagaaatctaaactgaggtgggaaatgggcaagatgtgtggcagagttgtggcccagggctgaatcccactgtggtgatcatgtgggctttctctttcccttctttatagcccctctttcacactggtgagaggtagtctttaccagagcaagaggatttctgtggttatcacctgcaaataatcaacagccaagtatattgcagggaggtgtcccctatacattccaacccgtacccataccctgccatgctttatttttctctagcacttcccaccatccgaatgctgtatagtttatttatttttaggtttattgtctgtctcctccagctagaatataagccccatgaagacagggtttttggtttgctttggtcacttgcttttggtttgctttttatccccagtgcctacgcttccacccggtatacagtaatacatatttgaaacatagagctgttttacatatttctctaagaaagaattaggaataactcttagcattrtagcatcatcagcatactaacagtgcatcaaatattggagatgtgagttttaaacactctatcttagctgggattatagacacctgcaagcccaggtgtctgttatgatgatggcgcccatgccccttgagcgaggttctgcacactaacgctcagaggctagctgtgatttccagggagggtgctggtcctcagccttgctctgtggccctgatgctgcttacgcacatgctcccatttctctaagtgagaagaaaacaaatactgcacacctgagctttcttaattggaactctcagagggatgctgtcctcttactctttggagaggagcctcatttttccttttccataaacctcagttcctcccaatgagctgttgtcatatctcttttctctggaggactggatagagtttttgagtccctctgaattacttttttgtgtccctctgaattacttttttgttacagaatctttcagtcagggaaacagggctgtgggtgttctatatacccctgatgaagcctcatagggctccttgggtttgagcaattgggttatgactgtaccttgggtcccgaccaaaaagtttttctattgccagcctgctagatgatgtcagaaacgtgtttctatgctgcattttttaaaaactgagagcaagagagcaggttttacttattccttggcatttattatcacaattataattatctaatctcatatatttattttgcccaactatgaggtagttggtataataaattttatgcttatataacactccatgaagatgatgatgcttttttgcattacctaaagtaacattattaatataaaggcaagagaatggctattaagttaatagactgcaacaactattgtttttgtctatgcagcaagcttcccatccaccttactatgctaacagactctactcctcaccccagcatactacaggactggccaatcacagaattcaccttccaggtaataaaagttggtttcaagtagggtatggatcccaaacagaagcattagagtccctcattgacatttctgtattggctgtgggaaagggaggctttgcttttcttctggactttcatggggctgccattggatccatttcccacctcatagagaagaccttttatgataggaggcagtgaggctagtgctcaaaaggaagcagaaaacacggagtgggaatccctgggtcagctcctggaggtcccagttcctgtagatgtgtctccagttctgtcagctgtcccagctacatgagctagttagactctgtttttgcttaggatgttttgaatttggtttctctgaaacagtcttaactaataccctattgatgtacagagaagttaagtgactcttccaacctayacagcaaagatgaggagaaaagccataggcaacaaagcctggacctttggttttaaatttcttatttaagccctctctgtgttttctttctatataaccgaacttttaaatgatataattagtgttcaggcaacatgggattactcaattaacatttactgagtgtctattaggtgccagtcagtttgctaagccctgggtttgcaaaagtaggtaagatacttacttractttcagcaatttgaaggctagtggcagagactgatatgagtacctggaggtgatgaatatagttccagggggatgcgraggaagctacgtctacctgggagggccagagaaggtgttacagactacagtgaattgtgtattcattctaggagactcattagagtcataaggaagaaacttgcttagactcttttcattgatgtcagccttttgcaaaaatgcaaagaaaccttttacaaagatgagagaaaaacaaggagtcttccgggcagcccaaaataaactagttgagatttctgagatgttcttagggactactggcaaagctgcttgcacttaactgagatatggcttgtgttctagtgaaccttctctatgttcaccactcattgagaattccctaaggagagagtatggttgggtctgtttgctgtcatgcaacatggagctattggagataaatctcaccacctccccctcactggcccccggcycctccccccccccmccaccgccrttccgtcagaagtagttggcccctgaattggtctgggtaacaggattaccttctcctactaatcaattcccaagagccttactttccttaaaagcttaatgtgtggtgtcctcttgcagctcatctagtgcagtactgagggacagatagaagtgtagtcatgagaggtgatgctggaaaggaaggcagaggctgggtagtgatacatgacatttaaaaattttactttttgttttactcaaaattatgtatgctcatagtttgaggaggtgagtaattgaacacattttactatacaacaaaaaagtgctgtgttctaggtgttctttcatatcttctagagaaatatatatatattttatgatacataatatttttagaagtttgtgttttatcctttcagttataagaaattgttaaaagatgttaagctggagagtaacaaaattagatttgaattttaggattgtaattctggaaaaagggtggaggacagattggagatgcgactcgaggcctggagaccagttggggaagatgcctgatttggggtagcgctgctgaagatgaaagaacagggggcatgtttgaaatgagaattgacagaacatagatttagagtagagaaagaggagctgttgtcttctgagttctttcagcttagatgtctcagtgaatttggtgttatttgcctcgttagggactatggagataagagcaggctaggataaagcagaatgataaacttgggtrtagatatgttaaattggtagcctctggaatgttcaagtagctattggtgatggcaatatggagccatggagagacctttggcctggagtggtgggtctgagaatcttggttcttattattaaatccttgcaaggagatgacccagggaagagggcattgacctgaatcttaccagaaaagcaattccaggagaatactttaaaaaattgttgtttgtttcccccagattacatatttaatgtattaactggtccttttactctcccattcaattggaattgccagatcgttcagcatatttttattgggtttccattatgtactaggtgctaggagcttcagaagggatacgaaaatatcagaagaaaatccttaccatcaggaaacttagaatatattgagggaaacaagatacgtcttatacatgtgaaaaggttaaaaatcaacaacaaaaaagagggcaataattaattgctgactaagtgatgtggacgctacatgctaggattcagagaagggagacatttgtgtttgaaggattgttttcgagtctttcttttcttaataaagatcaagttaaatctctctgaaatacattcttaatgtatattaaaggggaaaaatgtgaatatcaaaagaagtagattctcacatttacagtgaaattttctttacttgaatactcatgcagcttactagtacatcatcacttgattattgtaatttggttatgctagtgtattagttaattacaactcaatatttagcagcaaagtgcttaatatcttgactgagctttacagcattcctctgtcagttgggaagcagccctcagcagagaggtttctgcattaccatctctagttttcaatctttaattttctttggctcatggaagactactttccttggtttccatttccccacatggaagaaaagtgtttataggacctatctcctggatttttgagaaacaactaaaagaaataattgttattaggttaatgcaaaagtaattgcagtttttgctgttagttttagcggcaaaaaccgcattacttttgcaccaacttaacaaatataaggcacattacaatagactgggacagctttgagaatgaccatcatcggagtttcccactagcaataaaaatgaattctacaacaaatgcaacactctatttctggaggaagtatactgaattcgtgtaaagtgttggtattcttcaggcttttattgtactgtttatacagagtcctcttgacagctgttattaaacaaaataaatgagtcttaatgaccgtaagacaaagctagatgttcctagcttgtgagattatgaaaaaactaaagagaatcattccatccagaagatataaaaattgatcattttaggtaatgagttttgttcatatagttgaaggaatacacatctgtatgcagaaaattcagtcattcattcacttaccaaatatttctgtggcacttactatgtgcctggtgctgtgctaagcaccagggaattagtgggaaacaagacaaaggctccctccctcgggggatgttcagcctacagtagaggaatatattaaacaatacttccataaattactacctgctgtgacgagtgctgcaagaagtccagcacagggagctgtgaaaacatagaagagaggacccaaacctggtccgggattcagagaaggcttctctgaggaaaagagacgcatgctgagacatgaagattatgtaaattgtagttaagtagagttagggaagcgtattctaggcatttaaggcctgggatgtttatacctgtaaagatctaaagacaagaaggagcatggcccctctgagaaaatgaaagaaggccaagtggctgcagcgcagactggaaggagrcgaaggctccagacacagctggagaggagccaggtccgacttcatccaccagggggcctcagcaaggggaagccattatcagtaggcatggatgtgagaactttttaggaggtagatccaacaggacttggatatgggggatgaggaagaaagtggaattaaggtcaactcgcagggttttggcttgaatccccaggttcttttttcttagattaggatcactaagggaggaacatgtttgcaggtcttgtcgtgagtgggaacagaatgaatgggggatagagagttcagtatgggatgagttcagtgtgggacatactgactatgaggggagatatggggaaggcaagagcagttggataagtgagtctggagattaaacaggtctggagatataatctacagcccagcaaagtaagcaggaaaattctgtgtatatctgaatgatgccaaattaatatatctataaattttgtaagtagagaatacagtttagtgtgacccctaaatagtctgaaggaaggtttcagaagaccaaaaatttatgtatattttctcattggcatttacttgttcaaaatattggcatttacttaggccagctaataatcataactttacttgaaacttatattgactacttggtatcatgcccatcaaaacataggtttggaacagagacagaaaccagtatggtcattcccagtattccaagggcagaaagaggccatgacccagggagccaaatgggatgagccctcatcacggaccttctgggaggtagagggcacatgccatggggctgagacctgaagcctggagcctagcccactgcagaagggccaagtgaagcttggctgcgtggaggctctctggctctggcaagaggcctttctgcagtttaggctccattgagggggcttggcctcctgtgcctgctccagaggtgcctccatggatatggctgggccttgtctcctggagcagtccacagttctggccacagcgctcactcactgtaccacctctgcccattcatgccctttctctgctctttaaggccttccttctatttctacccaaatccaaggacccattgcaaggacccggtattcaatattctgccaaaatacagctttcctttcccttaaggccaccagaagagcaataatttagacaatcagtatgagagtgcatggagcattttgtctgaaagtcacaattggatatccaaagaccattaaactgttgtttatccagattccaaccaaagaaaatgcttaaataaccaagacttttcctacactctagagatacatctagtaaatatggaagtgaaagattaatctttgaaagctccttccagatgttttaggagtagttcaaattccgactgacatcctgccacttgttttcatttgtctctctgacttttgtctaaggatgacccacaaaagtttattgcatttagtataccattccatgtgggtgtcactggaaaccgtgtctgctaactgtgaggaatttaaacactttcataaataaggcctttcctagctcattagtgaaatagaaggattaattatcataaatcaagcctcataaatgttgtttcagaactgccattctgactataaaatcactgactgaaattagtcattgttaaaaaaaaaatgaaagaatcgttcaaagcaccaatttctgggagatttggcatagtttcagtgaaggtaactactatagctcaggaaaatttgcttccaatgctcatctgatttcagttgacagaagagctcaaaatggtcccaagaaatgcatctgctagttggcgctttttttccctgtattttggacaatgggctcattttgccatatttaaattgttgagatttatagagcgtgtgtttagggaggcttacatagatgatgctactacaagataggattttggatgaaataggaaggactcatgctcccaaggagccatggcactgattcaaattcacctggaattgtaaatgaccagcagctgctttctgccaggagtcagttttgataagagttgggaggaagggcacagagtggggagagggaaggaacactgcaggagtgggtaggcaagacttagaaaaattagactgacattgaagtgaaattcagcagaagattacagtttttgttctggctaaatctacaaggggaaaaacaaagtagagaattgaaacagctctgtgaataattcaattagaaaaaaccctactcctcccctaattacagggatagatctgtgaagagtgagattttgtcttaatcctttggatttatatctactttggcagtgccgtcacagatattaagagatagttttgcttttagcttttcttactgatgtttatttaagcaggagacgggctcccaggaagaaggtcgtaaaaattgcttccattcccacccacacagttttgcagtacttataacacagcaagtggttgtaaatacgtgaatagaggactaaatcagttatgcaaaaaacgtactacttgggcttccacaagcatgacatttgctttctattttctttctctcaaaacctttccctgttttttccttggtgccactgattagctcattgcccagctttgagcaaaaggcttttagctagaaggaaaggaaattgtgtttggtttgctaaaaaaaaaatcttgccttccaaaggaagagttcagctttctttggggaggggtcccatttagggcttcttaaataggagtccaagtgctggaatttttaatccaggctcatgagagaagcaggcatgagcagcagatttgatttctgtttctggccagctgtctgcaggcagccgaggggatgcggagggagatcagtgaagagtggggcttgctttgggaggacaggagcactggggcagcctgggtctgccatgtgagttggtgtagccccaggtggggcttcctgtggggttgtttagtttggagtttgttaccttctcctaggtttctctactttccactgcctggccagcactagatagaaatgcacttrctcctaagaaagagtaaaaaattgactgtcttatttacatctctgcttcagatttgcattctcccattctttagggtcaccatccccacccccaaaccacactgtcaaaggcttccttcatgtgaatttgatccatcacttttggctaaacatactggagtcctctatgtttgggagctggctatctctgaatatgatcttccttttctaagataattcaatgacagtatgagtctgtagaacaattttctctactagaaaacctagctaataaattccctagaatttttgtttttgttagtttttctttcctaatgattgggctgttcaaggtaaaaatgaggttttttttttttccattttataatcttttgttgttgttgttgtcttgctttggacttttggccaggcaggaaaatgaaatcattgtgcacatggaatttcattttgtagctcatcagttaaatattcgagctagtaagacaggagattctcttactctattatctcctttctcacccttaaatattcttgtggaaggtgtcaagagaccaccagtttatgtatatatttttctcattagcatttacttgttcaaaatatgggaaaggccaggaagcaatggatagctttgcaaagttagtttttaatacatgcatcatggaaatgaaatcactgataggaatgagaagaaatgtacaaagactttccattctcagtagcgcgtagattaattcatacaaatgatgtaagagatccattagaagtttctagagatatccaattctttccaacctgtaccctgcatgccagtgaaaaacaaaaccagaggatcagatgatcgttcagatcctcactcatttcatggttatttgtgacattttatctcagtccactttcccatgagtgaaacacatgtgatctgtactcatgagaacctgtagttaactayacgagccttgctgtgcattttgtttttatctgagcctgtctttcaatgtcctatcccttgagagaactgagggctgagaaccaagctttccgaagcggtctgtgtgtcggcggtggtagtggtctctggagaaaagaatggagacaggataggacttggagaagagtgagtcattgttacccagaaaccctggagaacactgaaggcagaactggaatttgcattgtgtgtatgcagttgttgcatattcaacttcccataccaggaaatcttgtgcccaactgggaggtatctttctgtcaacttagaaacagagcacaagttttggtttttcaaagccagcttgttagaatattaagcctatttataaacctcattattgcagcacccatatggctgttgttcaaagatactcactttaaaaaagtgaaagactgccaggcgcttcataatttagcatcaatgtttaatcgactctcacttatccaggctattagaaacaatttccaaatcatctgtttgattctggagtacttgatgcttacatttgactgcaggtgtgcccagtactctgggaactcctagccatcaaaaagcaaataaagacccttaaaagcatccttgctcccacctcactgttgtttctcgctgtttgcctgcttatctttactttgcccctgactgtggacagaatcaccccttaagcttgcttagtttcattctttatctccctgactgagggcaggagaaggaaaatgaagttcagggtctagaagcttccactttatgacactgccgtggagagctttggggaacctatttaaatactggaggtcagtgctctttgccctttgatgatgctcctatttcagaatctgcctgtcaggatgtgaccagctgcctgtaaatggaccgaagccgttgaggggggttttggggttcatgtccyctgttgtgcacaagtgcacgcacacacacacatgcatcatttaatacttcttgggtaatccacagttccattgaaacattccggacataaacagacattaagactagtggtcttttaatttacttaagagctaaatgagtatgggttaatcaataattctagccatagcacatgagatctccgcattgagttacaacttcctgagactgcttaaggatgtgtgtaagcaagtcactgggctcagtttttagggagttattgataaaaaggactttytttgaaagataattttagatatttccaaggattattgtgatatccagttcataactatccagttttactttcttttctcctgccttttgggcaatggctcagctttgacatttaaggggagtgtgtggctctgctaggttaagtgggacattgctggggtgggtggcagggtgtacaggcaggcacacggccccttatgcatgggaaaagctgggcagtgtttcagctcattctcctcttagcagaactgagattagcacctgctttctttgtggttcaagtgttccaagataaggaaaattgggagtatccaatttttccattctggaaaagcaatcttcaaccttttttttgtgacttttaaaatcaatgaaagatttttgatcaagtaagttttgaaaacctactgaattataatgccattattatttatgcaatactactgtttttagtacagtagctgacgcttgagcatttccaggatgcccagcactatgctaaatgccctgcagtcatcattacatttaactctcacatcaccccgtaaagcaggcactgctgttacccaaattttacagatgaggaaaccagtggttggagaagtgatataagttgctaaaggtcatgcagcctgtcggacacaataagttggagaagggattaaagctcaggcaagtgatcttgagcagtatgctgtaatgcctccccttagaaaaacagaaacgacaaacagatgaagctgtgtgtgtgtgtgtgtgtgtgtgtgtgtgtgtgtgtttcagtgagagagagagagagagagagagaacggtggacccattccagggaacagactttgcaaagtgccactctagaccttctttgaagtggtgtcctcagcctggccttgtgaagatgcccttgccttctctcccagcatgaagctggcctctccatctcccaccctgccaaatttgccaggtcccagaacacaacagctctttgtcattctctactttctacatcagcttggtctagctacatgaaatcttgagatttgtagtgtgttgtttcaagtttcaaaatattacaaatttaaattaagttttagaaacaaattttaaaaacaagccaggaatggtggctcatgcctgtaatcscaacactttgagaggctgaggcagacagatcacttgaggtcaggagttccagaccagcctggccaacatggtgaaaccccatctctactaaaaatacaaaacttagctgggcatggtggcatgcacctgtaatcccagctactcagaggctgaggcaggagaatcgcttgaacccaggaggaggaggttgcagtgagccgagattgcgccactgcgctccagcctgggcgacagagtgagattccctctcaaaaacaaaacaaagcaaaaaaaaattccctttgtctttcagattgcgagtcagggattctgttgaagttcttaaaaatagaaggccaagaataaactggggttttttttccagctcatttcctgcattttggtggacagaatgcagtatgttttattgttattaattttattttggttttatctagtgtctaagtttcttggtggaatcttttgccttctttgtatacattccttaattttctttgaaggcttcagaatttgccttctgtctcagccactttaaggttctgtatccttaggcaagttacttaacctctctgagactcacttctgtcaagtcgaaagtaggtagaacctctcagggtttgcaggagttgtaagtgagttaacttgtgtaagaggaatggaacagaggaggtgctcaacaaatgtgagctccccagccttctcattgctttccctctgtgtgtaggaaaccacagctgtggtggatgtcctcactgctcattataaatcattgcttagtagaaggaaaaagaataaaaagaaagcatttttgatcaatttttgggtaaatgcattcatgaattcaataacaacatattgagcagttgccawgacaaggaagaaacactagcagatgtcaggtaagccatcrttctttccataagaataacagatcatgaccatgagcagtcataagtgcaatgtggtgggtaagctctggccactatgggacacacagaaggagtgttacccagtttggggggccctagaaggtctttggaagtgatgtttcagttgagaactgaaggatgagtagggctcagtcaggcctcaccaatcttgcycattcaaaataatctgagagttggatcttgagtaatttttatgagttgcattttctcttgtgctttaagagctgacctccaaactccattgtaagatgataccatttgggttgattttagggctgtgtctaaatgggagaagattgaagggggaaactttacaatatctgaagctaagaatatatctatgaacgaggggcgtgtcaggaaggtgagttggactgaaaatcagacttctggtctgtctttctttgggtctaccagatgcacaacccatcttttgatgtgtatgggtgacagttgcaaatagttcatttatttagccaaccatgtgccagttaacgtgcatgcccttgggatagatatagagatgcatatgacagacctctgacctcaagaagctcagaactagggaccaaggggcctaaaaatcttagaatgcctcttacatggcaggcacactacatgacaaatttaatacactatctcatttgagatcatctcatccatttcacagatgcagaaatgaaagcttgatttagcacagagcttgcctgaggtctcatagctagtgtgggtgaagttaggttttgagccaggtctatcacactccagagccctgttgcctttccacaaaatcagacatgagacaatgcaatgccacggagaacggtgtcagagaggtttcagcatgctgtgggagcacagaagagggtgtgtaatgcggcttcccacaagaggtgacactccccctgggtatcatcttttctaaaatataaattttattactcttcccacttaactctgtccttagcacttgccagccttatttcctgctacctcactytatagtccctgcttgctggactggtttgagaccatgaggcatgccctctgtttctgcttgctgtatacttccatatttcttcctgctgacatttcacccakcaatcaagactacctctttcacaaagcatcccttgtatttgttgttaaaataacactttaggtgcatgtcttaacttcctttttagaatttgcgctctttcagagaggggatcctacagagttatgaggattagcaaagtatattaagtgcttattgctagtaggtgctgaaaatgaagcttttcttatttttgttcatctttgattctttcagaactcccagcagtgcctttatagatttctttggcaagtattgggagaattctgtggaaaccaatagcaagggctgtcttcttctgacctctgaagatgctgtctgctgataggattagttgggcttctgagtagaggctaggggcattcttcttttccaactgcctccttgcctttggtccctgtatacgctcaatgggttattttttcgtcttgccagttgtaccttagatcagtttgttagactgctgtgctaatgagtccaagggcacaggtcacacccacagctcactatgctccatggctgaaggtgaagcctctgcccttggctgctgcctggaaagtgtgagctgtcattggtgacagggtccaggtgcgagagagtgattgatcagtgcacatgcatcatagcttttggggagagtatgaggtaaaccacacaaagaacttgcccttggggagctgatgttcaggtgaattatctcatttatttctcataacaaggtctcagaagaggggctctgattcttcccactttatatgcaaagaaactgaggttcagggggatttaataactagtccagcattgtaaagctaagtgctagagccaagactggaacatagatagtttgcttcaaaggccaagccttaatctactgttagtcaactttcctccctattatatgtgatataatataaacatggaaatatctctatatagtcctatatttgtatatacctttatatgtaactaggtgtatccatattttaatatttttttctgttataatgctcactctttaaagaaaatttggaaaattcataaaactaaaaaggagtgatttgtcatcctactaccctggagtcatggttgtcattctggtgtgtctcctttcaggtaaatagatatcactacatatctagtcaagaccacactgtaggttctgtgttacttgctgctttacacacctgacactgccctgtgtgatttcattttaacagagatgtaacaggtcctagtgattctcaatttgaaacctctttagtttacaaagaaatatggtacacagctctccattagcaaaccagtggtttgcttcctgggtacagtgactgtaatggaaatgctggtgtggaactaaggtcaactgggaaacattgtacttcccggatatgctacaaggagatggattttctttccttaacacttcctctcctctaatcccctccagtgctgagcctattgaaactcttttaagggtcttcagagtctacaaaaattgacacacatatgaagaastttgggatattgggacaacatacattttatggccattttctccttgtctgccactctgacctaggtgagatggtcagagcagatgttactagcttcatgtgatagattaagaagcctgatgcacaagatttgcccaaggctaaatgactgtaaataacagacgtgggctggaactgggtctcttctgcttcctggggatggttcctaatgctggttctcaacatttgcttctagactttctcattgtccccttcctcacttcttctttttttgaagaccttatgtctcatctcatagtttagctgcatgattgcacatttayatttaaaaaggcacatccttaaagggacctcagtgctagatgttggggataatagtaacgatagtgacaacataaataactgatcattattcaccatttaacccatttaatatgtgccagataaaagaagtgttttgtaagcttgtgtccatttactctgtaagaacctcatgaacctggtaaaggaaggactgaggtttgaacctagattttgtggtctttaaagcctgacctcaactaaaatgccatggaaccttcaaaaggaaaagggaagaacatgggagcagagccactgagctcttgggatgctattttttactaaaggcttaggttctgtacttctgactacaatataacacagcattcccaaacttttaactaagctttgaaacccataagctwcacagagaaacccccctaagaagtgttgacccccatgcccatccccactgaagtaatccctttcttacccactgcctgccacaacccttttctgatawatgtttatgccttttcttacaggaggaaatataagaaaacgtcccagaggtaagaacgtctttctgagctgcaactggttgattcatttgtggcccagctcttcacaagtctggctcatggtggactggaactgtaataaacaggcttttggttctttctcagcatgttgcgtgctttatctccgatcgtgactgctgctgtaattaaaaattgattgcaggcatctagtgaggcacagtaggtggatgccttcacaagagagtagatcctgtgggctcaaaagcttgttactgccrtgctgtctagtgattttcctaaaaccttgaccagagagtgattaggctggcgggggctgaaggtttatggatggggagcacaaagcggtctttatataacatgtttagtgtctgaattctcctttgtctcagaatatcctttgcctgatttgctgacaaaatgctgttgagctcaaagcacaggcacagattcctttaagggcagtggcagtctttcgatttgactgtggaaagggtaattttaactagaatgacatctgtcatcatccctcatgtgcccagcctgcctctgggctgtgctttgcactctttggcataaggagccatgagggatcaggtggtcactggccctaacctatgtggctattaaatgttggacttaaatcttctgtatttatagttcaaaaataactcaccaggtttttgagtgcatggcctccgaagtccaatgggaagcccatttttcagtgcatatgcgattttcattccccattacaggacccgttgacagatgtagtttgctgacttggtggagcagcatgtgtatttgagcatgcatacaggttgtgactatggagagggtgagtgggttctctaatgatagaataatgaaatgagcttaggaaatgtcatgtacttcctcgtggaatttattcatttgttcatcttttaaaaattatatatatatctaaagtgtatgatattttttcatatgtgtatatatatatatacatacacatagtgaaatcattacagtcaagcaaattaacatattcatcacctcacgttgttcattcattggttcatcttgtatacactgctttctgttttttacaatgatttgttttcacaaatttcattggacaataatggcacagacggtctcccatgacctcttttatttctccagcgtcatttcttgctacttccaacctccatctttattctttaaacttagctatgactctccatcaaagttgggattctaaaggtccagctgatcatggatgctttcttaggaagagctttcataaacttttagtaagcatattatcttaggcttatctagaggtgtagacctcatgtatgttaggaggcttttcttgagttaggtggtcccataagattataatggtgctaaaaaattcctattgcttagtgacatagtagctgcagtaacattgtagtacaatgcattagcttttctatgtttagatatgtttagatacccacatacttaccattgtgttacagttgcccacattaccaagtacagtattatgctgtacaagtttgtagcctaggagcaataggctataccaacagcctaggcatgtagtaggctataccatctaggtttgtgtaagtacacttaatgattttcacacaatgtcaatattgcctaaggacacatttattataaggtgactccattgttatattctgtaatatttattctttttattgagaagagttwggaaataaagttacttagaccttttgctgaccaagcatttgaagcccacaattcaatctagamggcctgtatctgctttcattgtacttgacttgggtgttatggaattaaacagattacatgcagattaaaaaaatcattaatgcaattaaaatttgccagtaggtttcaacaatggcattttttagatcactgctttagtctcgccttttctaatgagcgtcatctcacagtagagattcctgtgttgcatggtctcctccaggggtgtccagtggagagaatacagtcatgagttcttagtttctgtttctatttgggccagtraagccccttcctcatccctcttttattcttatcactatagacagaaactaaaaatcatggcttcaggctgctaaaagcctaaaacaaaacaaaacaaaacaacaacaacaacaaaataaagtgggttgagcaaacttgggtccaagggagtggtattataatttgatatgcagcatagagtgcacgagtcattgagaggaaaatgaactaaaacttgaaagcttcctggagattgctgtacttttctaaatatagtgagagcttgtacagatggctaaacaattctgtcttgttcaggttcgttggactcacggtagtaattgcatgtgaaccactgagcaggatgtaaattaatcactcagattagagggcacagtagtcttgagtagtaaaaagtaatttatcattttcacatgtagttaacctggagtatgaggtgcttcaaagttgcctcaattttattttaaggagagatacttagacagtgagaggaagttttacaagagagctgctcaaacctgtcaaggttcaaattacaatgtcaattttgttttgaaagtgtgttttttgcatatctgasgtgaatgctgttgcctttttttattttgtcactgtaatgaaaaataaaccaattatgttgaacaagctttattgaagtcatttaaagtgtgaattaatagaggatcagtttgagctcttctatttttaatgaaatacattttttatatgaagtagatccatgtgcttctratccatcattgaattacaagccatcctcaacttagtggcttaaaataacttttattctgctcataattttgcaggtcaggaattcaggaaggacttggctggctggtttgaatctgatccacctggtgtcaactggggctgctggggatggagactccacttccaagatagtatctttgctcacgttaggagtcttggtgctttttgtttcttgctctctccctctctattttttttctctctctccctctctcctcacrtggcttttgtcctccagggtgcttccatctggcttgggcttcttactacatggtggkctcagggcaattgcacttgtctggtttcttaggtcaaatgttctaagagacaggaattaaaagctgctagtctcttaattatggcctgggtccagaagtgagcacagcatcacttctgctgtgtcttattggtcaagctatcactgaacccacccattcaagagaatggaccatagactaaatctcttgataaaagaagtgttttaaaaaatttccagccttgtttaatctatagagcaaaccttcagcctttttcagaataatcttgcttgagaccttctctggggatctgtagatttggagtaggtggattcctcatttgatgaatggtagacaattttaaatatatcttgacactcccagtcaagtaatggtctgtttgaatgtttgcttgcctacttgatggtttatttggactgggaatagctgtgattcctttctcatggtaggaataaacacagcaatgtggacttaactggtgagtttaattctaactgcagttatttggctggagttaataattagtcaaataaagtaggtggcttaatataggaaaactaagtgatataaatgttatattaaraggtttgatttggacatcaaagggaagacagcccaggatacaaaaataatctacatttgtttacgcttttcttgctaactttcattttatttcacttatgtatttgtttacctatcaaaaccttgttaaagaaaaaaaaaacccacagctttcaaagtaattgtcatcctactacaacacaattgaggcagttatctttctttaagtatttcaccaagtacgaggcatattttggtagcccaagggaatgttttgatgatagtgattttactgagtctcactcctagcattaaggagagtatactaatctcttccaagaccaaatttcagtagaaagagtgatttcataagtcctctttatcgggttagcaagggaatcaataggtagtaggtaagcctctccttgcacagaaaaccttattggattgggttttaaatccacatatttaaggggaactatccttttgcttgtgaatgaatcttgttcatgagggtcaatcattccaagagatttgcagaagtggtgaaatggtaatttgacggctagagaggattacgctgtaaacctgcttactcataaatgtctcatccggtttcttttaatagagtttcaccttcaagttatcaggtctggcttgcagaagtttatacctttgagaaatacttagaaataaccaaatacttatgagctgcccttgaagaaaggaattgctatcagagctgatgttgcaagctgaatctatgatagaggtgcttccaacacacacacacacacacacacacacacactctgtctcgcacacacacacacacacacacccctatttcagtatgataggggattaagaaatagaggcacaaattaaagacctatccacaaacctgagggagttctacagacacacgttcaattttcatgtgtctggattatggaaatactttggtcagaatgtttaggagttggagttgtggcttaaaaaagccataccaggtaatgaacaacctcattagcatgaacatttttgtttatttgttattaatcatagcactgtttagatagtttaggtagaagttctagctcttactgtgtctgatttattcattttctaaatctagacatatttctgtgagtaattaactttagacaaaggtgtccctcatgtttttgataatcatattatactgatagtcacatgcacagtactttacaaaaatcttccatttaacaaaagtttatttaatacttactatagtatattgctatatagttcagtaaatactggaaataacaagatatgtacaattgcctctgttaataggtacagaggcttgtaggtgagatacaggtgaacaaagggattataataaaatgtggtaagtgctataatagatataagtattgaaggtcattgggaacaatcagatctgttgggaggatacttacattatcatatactcttctctcgctagattataaagtgagcctccagtattgtttattattcgtggtgcttgaaagtatgggcatactgaagtctaataggatagcccagaatctttccttcttgttttcttcatgttttcagttattttaaaaatgtatgttttgctgatttttaggctttctttttttttwwwaaaaaaaaggcaaatggctcaaaaatattctagacattaggaagaagacagcccaggatacagacatgtgcagataattgataacctggatattgtacatatagataatagtgtggcctctatctgtggcaaggcaaagcaaggagttatgtttttccatgaatgtctaatgtgttatttcacttggattttgacgtggctcagtaatcacacttgatgaacccagtaattgattaaatccagcaaatgattcccttagtcaggcctgcccatgttcagccttcatgaattgacatagctaataagtcatcatcaacagccacctttgctggtaataatagattgtcacatgtgaagggagggaaggcgagtggttatcaccctgtgggaggctgcctgctaagcagttgtatcctaggatgggatgtggtacatcttctgctgaactctgcccgtttccttcccaggatatattaaggcccattggttaattccgaagttctttcagcacctttgaaatagaattggtagactgttgtcccctacctttgcaattaaaagtggcagctaagtaacttgttgggaaaattaacaggggtgacactggataaatcaaatcatacatttttgcaaacttaatgcacaaccaatcctgcattctactgcttacttagtagtrttgattttcagagcctaagtggtaacatcagggacaagaggatcttccaagagataaatccctttacaaatattttcctacatttgtgatgactaataatacagtctcaaagtagtaagaacaagtgcatcagccatgagaatgtgtccagtttacattccaagattgccacctgaatcagggtgcctttatagcagccacagtggtctggttagagccccagtcacagatggatgctgagacttagcctgcaagtgcaagtcctggggcagttaatgtgagaaagggccaaaaagcactacaatttcaggtaaaacatggctgggggtgggggaaggggagtgatggagagtctatatagttttgatcagagttcagagtacaggcagccatcactcattcactacttagtcattcactcacttacccttgctaatgtatcagcaggagtcggtggggggaagggagggggtgggaggggggcagggcacaggtgtagggatctaggcccagaaaggctatttagaggctttcacctgggaactaggcatgggatgagagggtgctgagatgtagtaagtataatagctcaggcacttcgtctgggtagtgtatctagacaccagtagcaggagtgaccttggcattgagctgtcattttctgagtcaagaggatcatctaggcacaattcattcgtcttttctcttccatcttccttatgtctgataattactaccattcttccatttatccaggatcaaaacttctgagcccctttgtatgatcttctgttgggtgttycttcaactttaactttttattcttcctctttgcccatgatcaatgggtccctaacggattgtgggcttttccttcacattactttccctcccatgatcttggtccagtctcatcacctgtctcttagagtattgggtggcctctttaatctctttcattactctggtttcttcatcttctccatgctgcatacctatgtctgattactttctccacagctcctctgattgtgccttctatgtttgaaaaatagcaacaaatctccattggcttcctgttggccattaaatgcctatcttcttgtcttggattttaaggctgcctacacttgcttccacctaaactttgctgctttgtctgttaccttgttccattcaccctaagttccagtcaagctgaactccttactgactgtcatatttgcctgatttttttatgatcctttcttctttcatattctttccagtactctaaatgttctcatttttatctgttgaaatcccatcttttcttcaagatccaattcaaagaccatccctttcaatggaaacttcttaggtatttccacctaaaagagttcctgcttctctaattctgtataagagttagtggggtgcatgtcattccttgtggcatcactgatttttttaagtggggaatatgctccccaaaagcattgggcatgacagatctttattaaatgtgcattgattttatgaataaatcagattgggatccttcatatatttctatcatgggtcagaactaacgtcatagttactaggtggaactstgggtaaataagtttggattgtgactcatactttcaaatggctttgcagttcactgcatactcccacacgtagactctcatttgaccctcacactggccggtgtagaggcctgtgaggtcagcaagacagatggcatgcatggcaagaatcagtaagtacataattgcttaaatcattgactctgcctttcttttctttttttagtccctgcaacatggaactcaagctttgggtggaaacactgagagtattttagctttaatcagtgcttcaatctctgtgtttcctctactcaagccattaatcctggaggtgcttagtacagtatcagatgtatttgctcagggtggatcattctgaatatttgatattcagktatctgtgtggttgtgcatcatttggctgtttggcggtgttttgccaaaatggttttgagagtaagtttcttagattgcctaataagaccgaagtgcattttcaggactgtcaatagcacttatgcccaggcatatcagggtgcttcaaaagttatgtccagactttaagttacctgaggaggcaaatctctaaatccttcccaaacctggtggctttcaatgctaagaggcacaattgacagggttgaatcagtcattagtgagggccgccatgctggggccaagttcaacttccagcagcagcagctttaaaggcagatttcagactccctggagacactggtccaatggagtaggtgagcatttcttaaccatggcactattgatgcttttgctgtaggggctgtcctgtgcattgtaggatgtttggcagtatccctggcctctgcccactagatgccagtaacatctcatcttcccctagctgtggcaaccaaaaatgtcccgtgtatgtcaaaatcacctctagttgagaaccactggtaaagaggtaagattaagaatcgtgtttgtgttctgtcacatttagctgtgccgaattgctcctctctggttcagtgtccttgtctgtaaagagatgagattcaatctgagaacgaatgtggtctttggctcaaaaacagtattctctggttccagttactgaggtccttccaggaggaagtctaggtcactgaacaacatctgcagtgatggtgggcactctctgctgtttaactgaatcaccagaaaagaacaaagctgccagttagcacagagatcactgggcaggtgacatagtctgtaccccatatatattgtcctttarcccctagccagattatccttggtttacaatacttctaaattcacttaattaatgagaagtaatcatgggacattaaaagtattgctaaagcacaaactttggcaagcmcataggtatgtccagagggccccctactgattgaaatctattgtgtgtctacagtgtgccaggtgctttacatgcattttctcatttgatcttcacaatgatcctgttttacagaaaaggaagtcrtggaaaagaggtaactcatctgaggtaactcaaatgagcagacaaatggtcgggccagggtttaaaggcaggcctttcagacactgaaagtttcttgagttctttctatccctttggctttatagttttttttgtctgttttctgtttttgtttttgtttttaatggagtctttctccattgcccaggctggagtgcagaggcaagatctyagctcactgcaacctctgcctccccagttcaagcrattctcctgtctcagcttcctgagtagctgagattacaggtgcatgccatcatgcccagctacttcttgtatttttaatagagacggggttttactatgttggccaggctggtctcaaactcctgacctcaagtgatccacccgccttggcctttcaaagtgctgggatcataggcatgagccactgtgctcagcctggctttatagatttttacagctgtggagcccctcctttttttttcttccccaaatgaagcagcttaaagctgaataaatcaacgtcaaaaagatctgcctttggtagttcatttctctactctgccaattgttcttttctcttcagacattttatgtttgaaagttttcgtatttggccttaacctaaaagttgaagctctcaggaaagtttaatgaagacttaacaaaaaaacaacaagctatatttaagtaatgtgattgaaagggaaaaatcctcacctccaccaccaggttcttttttcaaaattgtctattttcgtacttaacagctaaagtgctttgaagcgatgtgatcagtcatacatgaatacataactctttatgcataaaaaaagtaaataacaaaaatagaatcggataagagaaaacatgttctgtatttttctatcctctgatttaatacgatactgccttttcaaagttcgtgaggtcactgcctgaatttttcccttttctattccacaagtgaagtcacactcagctctgctttgtttattctcataaatttgggatgtcgaggagagggggctggaatgatgaacttctaagcaagctggagggagtatggcaagatgagaacatgctttggaagggtgtgtctgtagtctttgccctgccatgaaattggaagagtatagggttggaatacagagcaggggtttggagttgtccatacttgggttaaaatctgagtcctgtcgtgaacctggtgaaatgcttgtgtgggtttcccctgcctactggaatctgtttcttttggtaaatggaaatagtatttgcttcctagggttcttgtgagcctggaatgaaatagtctatgtgaggcacataggaagactttggtgtgtggaaagtccttagtcactgaagtcttgggacttcagtaccggaattcagtgaccactatgcagaaggcttacactttgagatgatacaggtggaagtcttgggtcatctaagggaacaggtaggaagcagacaggtcttgttcttcaggggctctgtgaggcagagtctggatcttatttactaaagcrtggaatcagccttaacaagggattggtgactgtcttttggggcacatggaataggacttaaagaagattggggtaggtggggcaggagatcaagctacgtaagggcaataggcattgggacatggaccttaattaggaaaggaaaattttggaagggcacagtctcttgtggccatagaatatctttctacgggaaggcatttacagtttgtcttcatttttagttttctattttgaggaaaatttatgttctttaaactatcacagagtaaacaacactgtatttcattgattgagagtatacattcttgtgtcagaatgcctggcttctgttcaattatattctaagcatatgacctttagtaagttactttatttctctaagccagtggttctcgactgggggtgatttggctgatttggccctacgagggtatttggcaatgtctacagacagtttttggttgtcacttctggatatggggtatattactggtatcaagtgaatagagaccatggatactgctaaatagcctatagtacatggaacatttccaccacaacaaaggattatccaaaatgttagagtgccaatgttgaggtacatagttctaagctgtaccttcttctttaaaaagagaataacatacttaccttgtgggtttgttgtaagggttaaaagagataaagattaaaagtgttaagtgtatatcctggcttttagtaagtgtaaagaacattttagcaattgttatcaatgttactattttgacttattgttgtttatgtagtaaatttatgacttatgtttcataaatgtagctgacaagattttataggtgtattagatacatttacatttcacaaggaaaatttttagacgtacttttaatcatgctttgaaagagattttaaagttgtcttgaagggttaatattgtgtggcttatataaacacagtatactacgttctgaaacaaattagaaatcataagttccacatgctattgtattttactagtcctgaaaagcacaaaatcacaggtcttaaatgaaacactttggtattgttgcacattgttacctaggaggcaataaaacaaaatatrtttactgggaaatgaagttccatcccttacttgtgggggtagagacagtaaattataatagtgatttcagtgaaaattagtaggtacaaagcaaatcacaatataaatgggaatagattcctacttagtataccctgacaacacaaatatccctagaaattgataaaagtccagtgcttctgaaagcatggctgaatgtggagtcacaggcaagttccttcctgctgcgaggttctgaatcgcggagctctgccaccaggggacagggtcgtccccgttgtcctgcactctggtatgtacataaatggaggactttgtgttgacttttctacaatcagttctttaatctttcagatgtgttccaccattagatcataatcaagaattctcagaattagcactgcaattaaagcatgtgagaacccgatgtgagcaatatggactgtgagatgtgcaatcatccttctgctgtcataccaaattcataatcctacatctttgataattttgccatgattttttggataattttagtaactacaagtgtgctctgttgtttgtaatagtactatctttactgatcacccctactcactcatgacccattatcaagaaagtaggttaacccttaaggtaatgcaaacagtgcctgtttgctgggtaaacagaagccccattccttcagaggacataatgctactatttgggaatgaaggtacttaataataacaatataatactggtgatgaggatgatgatggtggtgctgatggtggtggtggcccatgagcacagttattgctaacttcatactttcacctgtttgctttacatctgcttttctttcctgctgattcattctattgagaaacatgttctgggagcatgattttgagatctgacagatgagattctgatgaagccattgtaaagcttaaatcgcttcccatttagcatcattattttgaatagaaagaaatgtttcttaaattagtctcttgtgtcgaagatgaatcatgtttaaagggtgctttttgtcttcagattcatagggtagatgatcccccctctttgatatcagtgacttacttttgccactggcttgggtggaacattgtaggagcataattataccagaagactgtaaaaaggcaatatatcactagcattcagagcatggattttggggtctgagagatgtaaatttaaatccattttccaccacttaaactttgtgatttttcggccagttaagcttattctcagggtggggcttactaatggtacctaattcaaagggttgtgataagtaaatgagacaatgcgtgtatgctatatggcccaattctagatatatatactagctgttaatataatgcctgccctcccaataaaaattaatggccacagaatgtcttccttcatcataattaactctctgcaaaacttggcctccctcaggcacttattctgcttgtgcgggagattaattcttcaggatctcatttattggaggatttgttggaatggggtctgcaataggcggaggtgggagaatctgtgtctcatgcttcaggatgatcctcaaggctgtgaaggcaaaacttgcaggtctgcataaagaggctaaaagaagaaatccaacccttttatcctaagattctaggtgtcacctactactgttattcttttgatccctgtatttatcttctagtaggctctgcaatgcatagatctgtgggcagggaccttatgtttccaccatatatttaaaaagggtaggtgagatttgcaaaatgaaagtcagtccatgtggtttgcattaataatactactgagagattgaacaaattgaaagtacttattttaaaaataagtcatactgaatgttttgagttgagtgtattttatttatggaggtaaattttgacctgactccactctcagactcttcatttcactacaggtttactgagtggaactatgcaattagtagtcaagcactgtgagacattaaaccaaaaccaaaacaaaaaatgaaatgtggtttctgccctcaaggagctaatgacataattggagagatataggacccagacaggtaatttcaatataagttatttgacaaaggtacaaagtcatagagaatttcaatattaagttcttggataaagatgtaaagatttagttacatctgcttagtttgggggttcagaaaagtctttctgtagatgacacctgaggcttaaggatgagtaagaaaaacagccagatgtggaaaggtggtatgggtgttttatttagaaggaatactatgagcagatagttcatttttatcaccgcttttgttatctgagtcccagtccctgctctggcttgagtgaggtttgtatgcaagagaagggaargattgctatgctgtgggtatccttgtgggtgaggggcaactccctgccttaattaccttatcgtgaactagattatcactcccctaagggctgcaagcaaaagacagaaaacacctaataaagacctttctctacttgagaacatgcagtgtggccatttgggctatgtggaccacttgtctgtcagaatggcccatttcaaagaaaccaggaatcactttaaaataagaatcagggaaaataaagactcctacaacttccataaaagagtagagattgacagtaaatgatgagatgtgatcccccctttttaaattttctcagcttttgtaaggctggtatgatttctttcttacgtaattgatagaatgcatcagtgaaaccatctagatctgtctgtctttgtaggaagatagtattgaaacagttctcaaatggtatcagaattaccagcaaggtctgttaaaacacaaattgctgtgacccccaccccacccactctaaagttctgatttggtaggtccgagtgagagctgtggatttacatttcaaaaagtttgcaggtgttgctgatgctgcctttctgctggagctacatgtggataacctctgccttaataggtatagggatattcagagtttctatttcttgttgagtcattcttggttaagttgtggtttttcaaggaatttgttcatttcatctaagtagtgaaactcattgacataatgttgcttgccatctttttaatatctgtaagatctgcaatatctctttttcattcgggacattagtaatttgtgccttctcttatttcttgatcaagcttgctacttgtttattacttttattaatgtttttaaaaatcttctgtccttgttaactttttctgttgattgtgttatgttttattgtgctctgctttttgtttattatttcctttcttctacttactttgggtttaatttgctcttcattttctaacttcttaaggtgaaacgtagggcattgattttaaaccttccatcttttctaatatgagcatttaagctatacaactcactctaagcactttctttctctgtacatccctgttgcctcatccatacccctattgttacctagtaaacccgtaggatggatatgctggggcaggtgaatgaaygaatgaatgtagctgacctggtagtttagatggctcttccttcatccttgtttcttgcgtatgtggttctcagacaaaggaattccatttataggagaaaaagtcatttctgaagtaaacaatttgtgaatggagaaacctgtgtttagaaaaagtgtggtacctgtgaggctggcctgacacttaaagagcatgattccactgctatgttggctgaattttctctgagcttgccccactctggtgtttccttcacaggccaggctgtccttcttgttcattatccaagggggtcaagatgaaatttctctcccttcaagtcagttttcacaattgaccaggcacgttaaagctgaaacatgggattacctttcctgttttctcagcagcagctggcatccattgccatcagargcaagagctgccctctgctaatagactctatacacttggacagagatgattcatactgctaggatttcgagctcctgggtctcttgagatgaaaactctcagatgcatagattttctggcttttggcaactcatttaatgagcaaataattcggatgctctttacccccgcaaggaaatagggaattccctgggaaatttagtttgggacccatcactgtataaatcatttacaacaaacgttgatcagaaaatataatttctttattctcttccttttaaatttataccattggtattgattgcaaaacaaacaacaaccaaacaaacaagctaggtgtaagagttaaagaaagaggaaagaaacgtgaaaagcagctcaatagtcaaagacaggtttattttggagaataaacctgagaggggcttctggccaatttggtcaggagcactctctcttacagactaagagtatttaggggttcagagtgagagartttatcacaggctcggaatgtttctgtgtggaggagaagtttattgtggggttggaatgtctctggttgtaggggagtttatcttggggcaggcatgtctctggttgtggaggcgtttgtcttagggttggaatgcttctggttggagatgtcayttgtagtttatggtcatgctgacattagccattaggctgatgtcctttgggttggatttcggtggcttttgatcaaggggaactttaaaatgttggtgcttttccaagagggcaatgctcctgctctgtcactaggctgaggagaaactaaactttgcctttaaataatagagtatgattgtaataataaaaatagccataatattacttgaagatgcatgataatcatgtccttggcactgagataaatgctttacacacttatttaatttttattaactcctctgggataggtgctataatattattgcctccattttatgggtgagaaaactgagtcttagataatcataagtaactttccaaggtcaggaaatgatggggcttggttcaattgaggtcaatttgacttttggccccaatctcttaactcttatgctaccttgcctctgtatttaactttggaggtattgggatatagtgacaaaggtgggattatgacttagtgtttacattaaagttcacatcagtactgtttggaggtttggttaattcctgtttagattttttgtgcatttgaagccaagcatgactgggagctaccatgaacacaccttggggagaaaaggaaaataatttttgtagagaatggggacctcagtgaaaactgtgccaaggaataggatctccaaatcgctcagcctcttttttcactgctaaggggaatccatccaccagattggcatctttgtccgaggcacaaatctgtgcagcacaaatcagcttttcttcattcttgtgagatttatgggatgtggcttctgattgagccataatgggtagggggagtgggggatgtgagtaggggagagggtaaccagaagctccagcccatctgttgggccacaagagggcttaatttcttccycattttgcttttagaagytcatgaaggaaacctgtttttccagttctttgctcatgttgtctctctgctctttccagtaaggggttgatatccaggtgctgtatgctggtttgactgtgacacacagtaaaaaaatacactttacattatgcgtgcaaacacacacacacacacacacacacacacacagtctctcatcttactaccactgattaagtctaattttcctattctattttattaacataaaattgttggctataacccagtaagctgattttattatctactgatagagagcagtccataatttgaaaattactgataatggttggtgggagtagagtatcagagcataagctatatccttttggggatgaatttaaatgtccaggtctaatctggacatatattaatgcatataagtacgttaataaatcagggtactgtttttgttttctggagataactcaatatccttccaggggtctttgggttttcctccaacctgaattagaagcaagccatgacaatttctctcttgggtctgtgggtcaagtcaaaggaggtagccaacagagagagaacctggtggagtttcaaggtgacagttcagggtcccctatttgtctcagtggttcagggtgaagatacaaggtcaggaagctgactgtgctcgggaaccacttcttgaaaatctgtattctttagagttttgcagtagataacagcaataatggaaaacaggtttttttgttttttgtttttttgccaaggtactgactgaaggaaggacatttatccccttaataacaaagggaattgcgctcctttgatgctcagagtggcatgaaatatattccatatacattcttcaacatgctttccagactgtaagttcattaaaactactgaatgaattccagggtgaggaagattaagctgtaatttactatatttcatggctcgcttctcccttttctttgagcccattcatctgtggatgagtcacaaagagatagcaaatgcaccacagagcatcacgcctctaggacagctttgggaactaacaattgattctgctaggatgccatcaagagagagtctgccccttcccttctgccttgccctgcctggggattcagccctcctttcatcctgggaaggtcttactccgtcagctgatctcagctgaagattagttttgagaagtcaccttctgaattattgtgttggtaagagagcttgtgatctccagttcatggtctggtctttccccatctccagctctctgctcacttgttagtctttccttgtgtacccgagctttgctgctgcattactcacaggaaccttacaaacagcacttctcaaaaagtttaatgtgatcatctggggatgtttttaaaacgtggattctgatcccgcagagctgggatggggcctgagattctgcatgtctaacggttactgatgccctggttcttggccattctttggggagggaggctccacaggttggtgcataggtgtggagagggcactgtctgtgtgcacagccctcattttcataagacccggcatgtgaccataagatggtaggtttttatctataataatagaagcaggaatcacgattccttcttggtagagctgatattttctctctagtccagtcacttttctctttgcattcatcttgtattkacatgtgccttttgggaatcagtgttcctgtcagtggctgtctccacacactcgtagcagtgaacagatgccctgtgaacttgattcttgcctcggagttgtgaggagcagggtatgccccagtggcagagagatggggacactctacgggtgtgaggaactcacagaataggaagcctggccttgctgtgaagtccctgctggtctgggacacagcctgacagtcaggcaagggcaagtaggtttgttttcctctttagaacatgaggtctccacctcctcctccaaaataacctttgaggcagcctcttctctccaggaccccatgtgggcttttctggcttttctgccccatgtggcatcctgggtttctagaacacatgtgattataacagagtatgccaccatgatcaacttatgaggaagtatgtctactcttttgactttattgtagtttttggccctagaaggaatcttggatgtcatctttttcagcctcaggtgaagcagaagctcagatggcaaagggttgtgcacaaagtcaggtggccaagcatctagtctctgactactgggaaagcaaataactcattttacagcctccaggaatttctcccccaagcagtacttctcctgcggtacaaacctgtggccccctctgacaacgtctggacacagtctccttgccccatctcttcccacttccaggctccccactgtgtaaatttcctagaacccttgtggtagaggggcctctcctactttccatacctcacattcacatgtgtccagcctctgtttcctgcatcttgccagtctgttgattctatttatccatcaaggccctagtctaatttgacttcctccttgaacgcaagatcatcaggctggttgtaaggaaccttgggttctgatccctgcctataataagctatgcaacgtggccaagatctttatacttttgtgccttcattccctcatatgatcaaaaaaggaactggctsttaacacttctgtgatttcacaataccctgattccaccctattctctcctttctctgaagggttgcccttgaagcagtgtagaggtgtcatctagacctggagtttagattccagctctgctactaatcagtgtgtggctttaagcaagttacttaatctttctggggctcctttttctcattagtaaaagatagggttgttagggggaatcagtgtatagtaaaattatctaacattttaagcacccaggataattttcaaagaaaggtaaaattatactctcttttggatataaaatgaacatgtgttagagattttatttaactcattattaatgagggaactggtaggatgttatgactaccaatgatgttcaaatgacaatccaaagaatagccacattcatagattggaatgtgcaaatgaaggacaaaacacattccatagtggagaagggaagctcactgaatcttcacgagacagaaagtaatatttgcatgtcagtggacaggaattgtttcatgttgttatcagttatccacaattcatgtagttgtaaaatagatcaaaggctctatgggatatgcctcttgttgcagaggacagtgacaagagaaacttagaccacttggtcacctttaaatatttttcttggtggttgtatatatcaaggcaaatctcctggtgaagtccaaaatggagtggaggagcatagtccttccttgaggagagaaggaggtctttattcacagatagtaatagcatctaccacagtttgcatttagtttataaatttttaatcaggtttattataagtttctaaataggtttattatgaagttgaccagaaagtccttcctaagttttatgccctgcttcaggggaagatcagaaagtccttcctgtacatgctgtttctcaattccttcagcttaaaatattcaatatgcccaggtaacttattttggcggtaatgtgtctgaaaccccatcaacatgtacgtagaagcctactgatgtcttcagtttttcatgagaagattttcagcgatctaattttttaaaaaataaccaattcaagaaaacactttctctgtattcaaggatatatccacgtgttcaaatatattcatagacatggtgagagaaactccattcttaggtaagcataagcatgagtttggtgggtttcaatatattaaattttgatttgggataaacacatttgagggtgtgtactattgttttaaaatcattctttttctctaagtaaaatctgaatacattttctttattaaaaaaatactactgagaagaccaaagtgtccagtcttctttgattcctcctctatccccacaaccaacttatcccaggttcctcctgagagattatagctattgtcactttgtgtgtgtgtgtgtgtgtgtgtgtgtgtgtgtgtgtgtgtgtgtgttataatatgcatttttcagcaacttgctttttcactcacccgtagcttggrtatttttctatgtcagctcatagaaatgtacctctttttaaaaagtttacagtatggctaaatcacggttaattgggatgttctcttaatgataggcacttaagttgtttcragttctttactgtgataaataatgttgcagcaatataagaaggctcattattgtgtttattaagggacagtctttaaaatgcacaaatgtattggctaaactctgctttctatctctttcagatgtattggtgcatgtaatcaatgttcattgccttgaaaatcccttttacaacatttacacaattttttaaacctaggttgcattacctgtttgggtgaaagtcattgaatgtgggaatcctgctcttaaactcgatgccttgaggtaatttctatgacctgctgtgatattttcccctcccttctttctttcctctctgccttctttcctctcctcccacccctcactacacttacctccactcttgttgcagaccctagatggctttgcacctattatttcttgatttattctatcacaaagataaactttagttgagaaattctttgtttttccaaacagtgtgaaaaggttgattccgtaacttggctattgtgaatagagctgcattgaacatgggagtgcaggtatttctttgacaagatgatttcaaatcctttggataaatactaggaagtaggattgctggatcatatggtagttgtatttttagttttttgaggaacctctgtatagttttccataatggctgtactgtactaatttacattcctgccaacaatgtataaggatttccttttttctccatctgagatgatatctcattgtggttttattttgcatttccctaatrattaacaatgtgaatttgtttttgcatgtatttgttggtcacttgtatgtcttcattggagaaatatctatttaggtcccttgcccatttttaaattaggctttttgtttttttgctattgaattgtttgagctccttatatattttggatattaataccttatctgatgtatggcttgcaaatgttttctccaagtctgtagattgtctccgtaccttgttaattgtttccacttagatgtggaatctaaaacaacgaagctcatagaagcagataatagaatggtggctacagaggctggggggaagggaaggaatggggaattgatggttagaggttacaaaatctcagttacacaggaggaatttttttgaaatcgattgcacagtgtagtgaatatagttaataatattgtacatttcaaaattgctaagagggtaaatttctaacgttcttaccacaaaaaaaattaagtatttaaggtgatggatatgttaactagcttgatttaattattccacattgttttcataaattataacatcactttgtaccccataaatatatataattacaaatagtcaatatgtaataaaaattaagataaagaaatgggaaggatatatactggaaataaattagtaataataataataacaataagaaactgaagttgagctggttttcacattggcatagagcttaatctttcttatggtttgcatagattgaaggtgtgactcaagcactgttactgctgactctggtgaacctccagtagtaggaataatgaagcatatgaagagactttgtgtgtttgaatgaataaatacatatttgaaagggagaagcttgggacctgttagakttacactggaagtctagatctgctgttcaatatggtaaccactagccacatgtggctcttgagcccttggaatgtggctaccatggtcacatgttaaaatgataaataattgagtctattagttaaatacaatatgctcttaatttcagttgtttattttataaaacatgactacttagaaaattttaaattatgtctgcaattcagggtgtcttgctgttggacagccctgctctagctgtcaatcaggaggaagactggcagtgagccaggattgattttgcatcatcctgtttattagagacatacttaagttctaatcccacctttagtacctaaaggtgattaagtctgaatcccaagaagacttgcctatgctttttttctgattggtttttgaagatttaatatgatttcagtgtaaggcttgctacatcagatttttttgttgttgttgctttggaaacatcaaatgaagaatttgaggaaaatggcaatcactagattagcctaatagacagcagatttttttaaaagtttttttttttgcagtcatttgtaacgcagctcataacagtcaggctcatcttggtagaggatcagagtggtgatttttgattgataaaaatttcttcccattagtcttttttttttttttttttttttttttttttttttttttaccatttttgatagttttttttttttctgcctttgcaaaraaaattgaagcagtggcattccatttgkggtgaatttggaatcttatgtttttccatgttggtaaatttagcattcttctagaatgctataacttggtatctatttaaacacacatataagcacaaacaaacagaaacccacacaatacaccattaagtttgcatgtcaacatatttttgatttgacttttgtcagtctctgaagatttttgttttaatcaataggctttattttgtagagcagttttaggtttacagcaaaagtgagaggaaggtacagatatttttccataataacccccatccccacatgtgcagcttcccccactgtcagcatcgcccaccagggtggagcatttgttacaatcaatgaacctacattgacagatcattctcgcccgaagttcagagtatgtattatgattcactttgggtcatgtacattctacaggtttggaaaaatttataatgaaatgtatctattatcgttgtgttatacaaagcaatttcactgccctgaaaactctctgtgctctgcctattcaacttttcctcctccaaacccctggcaattactaatccttttactgtctccatagtgttatactttccagaatgtcatatagttggaatcatacagcatatagccttttcagatttggttcttccactcagcaatatgtattcatgttttctctatgtcttttcatagcttgatgttctcttttttttaatttttagtgctggattattttccactgtctagatgtaccacagtttgtttarccattcacctataaaaggacatcttggttgcttccaagttttggcaattatgaataaagctgccattttttgtggacctgagttttcattttatctgagtaaattccaaggaatatatgattcccagatctgatgttaagagtgtgtttagttttgaaggaatctgccaaactgtcttttaaagtggctgtaccattttgcattcctaccagcaatgagggagagttcctattgctccacatcctctacagcatttggtgttgccagggttttgtattttggccgttgtaataggtgtgcaatggtgaagactgtcttaatatggccaaatcagtggttcagttggaattctcttgtctcagcagaatggaccgaggtatgttcttgatgttctgagatcgacagtgaatgtcttctgtggttgctactgagggataagagaagatggcagaccagaggatggattaccagcatttcatctaaaactataagctgcagccagctttgccccatgtgcctattgtgtaggctgtggggctggcaaccaaagaagtgggaatgctgagtctaagccagaaaaaattcagttcagtccaaactctaattatcttggaggcagcctttgttccatttggtggttgattcattccgagcatggtttctgaattttactggggagagtgcacgcgtgtgtgtgtatgtgtgtatgtgtgtgcatgcacacgcttgtgtgtgaggtgtggaaatattggttacctcaacaggcagcttttgttttctgatagcagcttgtgtaaccagctgtcaggtagaggggcctcattagcagagcagattcctgggaaggtcttacaaggaacagacgctgccagcacgtggttggcctgaaaaggcacagctaggtaggtgctctgctcctcttccttatgatcaaagagagaagatgctcccctgtgaacagagaagtggagcagggacactatcttcactgtatgacctctggctgtatgtacagatagagcactccattcatgacatggacgctcagtaagtaattatgggcatgtcagtttgagccagccagtaactgatcttaacatcctctccctgctgtggcaaaatcctgaccrtggcaaacctagctcttcgtctcatttatgatgctggtaggacttgcttgctcagagctgctgctctcactttttctggcactgcccactcctcccagcctcctcaggttttctgtccagtcttggaaacgtcaaccagccttgctgggatcagcttctcatgttcctgagcagtgtccttcagctgtttagcaatgtcttcaagccccaaatacatacatgctcctaattatagtctgcatgccccactggtttctgctaatccccctaccctcaactcccactccagctcgtctctacacccatctggaccctggcsttgggtttcaagctgttacttgtgtctgacctctctgttggacctctcgcttgtactgcctttttggagcctgccaaacaaattaatgtaaattatatacacaaggtaaattttactcagccataaaagcccagtttgagatggggaagcatcttctgaaaagaggataactctacatgaggatgattccaagcttgtggcccagattctgctctgtgtgctttgaccctgggggtcggcatgaagggattgtattctgggaaatttgcctcttctgtcagtgattctgggaccatttcctgctttgctggtcattggcgtgcttgagtgttccattttaagccccccgagtagataccctcattgggctggtacttgaagacatcacttttccagtgttcttttaccatctgtccaggtcattacagttccctaaaatgaggaaaggtagtrgggttatattccctgagggaagaggaatctgcagttgccttgggaaggagacaggaatgagagagcttgggtgttaaattgttcaaaacatggttgttgataaaatgctacaacatttcagccctgtggccaaactgtatgtgggattctgagcttccgagagctcacagaactgtgtgtcagtggttcagtgattcaacttaggcctacctaggcagatgggcctagatgaaaagagctctgattttgtgtttaatctttgctctctcttagttgttgaaggaggagaaaataatttcaccaagatgtgaggttatgcaataagaaagagtaagagagtgaggaattaagaatataatgatgattttatttttcttttttcttttttttttgcttattggaagagaatgaatacttcttgagtcccaggctcttactaaaatgagctctcttatacatacacacacacacacacacacatatgtatattgagaaatctacatatctgtatatacctttaattttcacaattgccttataatgttgattttaatgtccttattgtaaaaaggtatattgaaaacttcagacattttataaatttccccccaaatcaggttttcatcaattttagattgaccagggatggttatacaccttcctccctgtttcctcccttcttttctttggacagtgtttattttggaccttactatcactcagctttatgttagatattgttcaactcaggagagagaaacctcatgacacatcctgatataaattgactacatatattttaaagtttttattttgaaataatgatagatgcatagaggctcacaaagaaatgtatggggaaatgccatgtattcaccttccagctccctcagggttcacatcttacttgattatggtacaatctcaaaaccaaggaattaacattgatattatccatagagctttttcagatttccccagttgtgcacacatcatttgcatttgtgacaattttgtcacatgtgtagccctgtgtaattacctccacaatcaacagcctctctactgtgccatcatggtaacacttctattttatggccacacccatcccctctcctccatccctaagccttgacaactgttactctgttctttatctctataattttgtaatttcacagatgttttttaaatggaatcatatggcatgtattctttaaagactggcttttttttttctcacgcagcataaactgtagataccagtattctgatcctttttaatgctaaatagtcatccacggtacggatgtgccaaaattttgtcttacgattcatgccctgaaggatgtttggggagtttccaatttgaggctgttaataaggctgctatgaacatttgtgtacaagttcctgtgttaaaragagattaagttctcgtgatgtatgtcttaaaattcatttgcgcttaagtatgaaaaaaagtcatcagattgtagagggagtttgacagctatagagagaaaacccaattagaacttagtaacagtggctaaggttgtttttcagcaagtatgatctttaaccaacatcatgggtcataagagatttcaaccattgcaagctgtatgttaaagccttcactaatcccactggcttttatactgattttgttctatccgtcttattctagagttaacgtttctgccaggaccagttgtgtagcagtatgtcctatttcttagttctttaaaggcaataactcagccataaaagccagcaggagagtacttcactgacaaattggttggccagtcttgtgtatgtgcattaaatcgttgggagcaaataggaaagaggaagagtgggagcaaagcctcttccggtttgcttttaaatgttaaaaaaaaaaaaaagaaatagaaggtaaagaaagcaaaattacactggatggattattgtgttggtaataggaaagtaacaaactattttatattgatttcccatatccctgggattaaaataaagtgacatgcaaacactgtgaaataattaaaattctgtcgttaattttttttttcaagtagatctaatttgatggcagaaggctttcccaggaggtccttttcagagatagaggtgtaatttgcaataggaataattatagaaacaacattcatattctgctttatctttaaagttccaggcctaagttaatttgtttgtttattcatttgtttgttcatttattcattcattcaaatgatattctgaataattattaatatttctgcttataagcctagatactaaaggggcccgataccaccttctgtgctccccttaaaccacttcattccccatcaccccatgattttccacattcatgacttctccttgsgacacttatcccctctgatcacttgtctgaaatctacctgttcttcaaatcccacctcaagtcttacctcctctgttgacttgcttctgatttctcctagctagaaatttcatacctctcttcgratttcctccaacattgtgtctgtggccctttaatactttctactttatattgtagttatttatgtccatttaacattcttgctactctgttgttaatttccttagtagtggattcatgtttgattccttttagtgtttatttgttctctccttccctcccttctttwcttttttccttcctctcactttcttcctttcctccctctgttcatttttttctctcattaaatatatgctgaacacctactatataccaaacactgtaataggggctttgagtagaaagaattaagagccattgtaggttcctaaggcaacctaattatgtacttaagttaaacatgaggaattaaaaraaattcctgattgttagattgagatactaagaacatcctaagacagaaggtattggatattcctcttttagaggaattttacaaaaattttagagaaattttaagtgaaaggcaactattttttttcttgagagaggagcatgtaaatgtagagttcctaaatggcaataggactcacttcagtttcagatccaggattctgtgaacctaaggaaaattattgtgttccaaggaaaattattgtctacctgtggatagacatcaactagatgtcagctgatgatataaactgaaaatgctagagggagatgtgactggaattcaaataatgtattgaaataatttttattggtacacaaaattcttcagccaaggaatacagctctgaattataaaaaaactattttaaaaggcaagtggaactacagaataagtatttcgtttgtttttacttcctgtgtgggtatctaattttgtaaattgttctatgactgaggagtttgataaatgataaacaagaatgccatcctctaactcttctctacctttctctcttctcagaaagttattgtggaaagaacatactcmaagctaggaacatccactaagtgtaatttgtttagagaggggtcagtgaagtggggtttgtagataaaagtttacaaagctgtcagaagttcaatgccctggattttagggaataaatgtagagtctgcaagagttcatttccacacaacaaaatctttgggaaacatcaaggcatctgcaactatggatgtgggaaaatccaggcagaaagggctcagagatcacaggagctcggcagtctttagtggccagcttcactggggatagaaccactatcaggaggggcaaaccagttctatggatggccccagtacggctggatcacactcaaattagaaaggagacagacgagtgacctggggagctctttctaaaagtcacttatgtagctacctcatatgctagcactgtggcatttctctcctgtgtcttgtttgtttctgtagcaaagcatctggcagcagagaaatatggctgccccaactatgtcacaggtcaaaagagtgttaccagactgagggtctagaaatttctgcaatgcaaaacatggctttgaatttcatgttcctggcaatcacaatgaaaacaaatactatatgatcctcatgttgttgggaagattttgatttgctccccagagtaaaatttagatttgtgtaaaatttttttgacactgactgaactcttttgggccttgtttgaatacagtttatctcattgtgcaacttaccaggatttgaggctctagtgtgcttttcagaaaaatgtaactgcaattttacactaaatgtttttactccctaaaaataagtatctgtgttttctttctgttttgattgtcaagtagctgtgtttcttatgtatgaaatttggtttaagtggccaactttgaaagaacattatgaaactttggtatttttcaggtccttgtgtcgctttgtgtgcttattatttcagaaaaaaataaatttagaatttataaaattaatttcccttaaaaaaatttttttttctcaccaaaaaggagaaaaaatatgaagaatttctatatgtctatttttggtcccttgaccaaccagagttttttagggcaggggatttgttgacttcttcatatcccagtgcccaggaaagtccttgacatatagcctttcctcaatattcttggaacaaatgcttattgaaggtgcacaaaagggttaggatgtcctgaggccaagaatgaaaaaccactttcttcagtgtttatcctggggcccaccaagctgaccactgaaggtagaagagagaccacttgagagcctgagggatcccggcatgggctctccatggcctgagtttcccatgttccatagggtctgccctgttcctctttattcccttctctgacacctcagctaccctcagagcttcatctcatctctgcagactcttaattctcaaagctacatcctccagcttgctcttttccctgaacttcagacctatatatccacccttagaagtttcatagacacttcaatttagtaaatccaaatggaatgtatttaaaactttttattccaggtttgctgctcttgtatgttccctacttcagtgaagggcaccatcatccagttgctaatgccacaaacccgggagtcacccttccctccccttgtttccctatcctatatacagtcaatcacaaagttgkgtccgttcaacatgtaaaatagttcttgaatctagctgcctccctacacccacaccattaatagcatggttcaaactatcatttctttcccagtggcctcttaatttaggtatttgcttccatttgtatttccttcaagtcatatgtagctgtactgaagccagaataatctttctaaaacatgaatgttatcaggtaatttttcagtttaatggttctgcattgttttcaaactaaagtctgagctcgctagcatggtatgcctggcctttataaggaaactcacttgcctttcctcaccacagtgaacactgtgtgcaccaaccatattgtatgtgttttaacttctcaaacaatatgtgcacctccagtcccttgcacattccttctgcccagaacacaattgattccttctttcagcacattttctcactaactctaatcatgttttagttctttacttacacattgctgcttccaggatgtttctcttaccacgcagccttgtgcttccagggaccttggactttgtcatgtttgctttttttttttttttttttttaaaacaacataatgtgtcttgtggtgcccctctactcaaggataaacttgactagggtttgattacctttgggccccttacctagcactatgcctggtttatcataggtactgaataaggagttaatgtatcagtcagggcatggggtgggggtgtgaatatagcaacatgactgtatcctccatggtacagtaggagatcttttcaagctgttgttctactaccactataaactgctggctcttcaaagggcattcttaggaaataaagctcagagttgtcaagggattagaaaaacattttttaagcatcttaatgagatacaattcaatactataaaagtcacccatttaaagcatacagttcagtgtttcatatattcagaattgtgcaaccattctcaaagtttaagtttaaaatatttttatcactcaaaagagaaatcctgtacttattagtactcattccctattttcccctcctactctcccataactctacacaaccactaatctactgtctgtctgtgtagattcacctattctggacatttcatrtaaatgggacaatacaatttctgatcttttgcgtttggcttctttcacttagaaagatttcaagattcatccatgttgtagtacatatcagttctttactcctttttaccaccaaataatattccattctgtgagtttgccagactttacccatttatcaattgatggacattgtggttgtttccatattttggttattatgaataatgttgctgtgaacattcttatgtaagtttttgggtagacgtatgtttttagttttcatttctcttgagtatatccttaagtgtgaaattactgggtcatgtggtaactctgtttaacattttgaggtgctgccaagtcatttttcaaagcagctgcaccatacatattacattcccatcaatagtgtatgagggttccaatttctcarcataatcaccaacrcttgttattatctgtttttggattattgccatcctagatgatgtgaagttgtatctcattgtgtttttcttttttttttagacagggtctcactttgtcacccagggtggaatctggaatgcagtggtggaatcttggtttactgcaacctccacttcccgggctcaagcaatcctcctacctcagcctcccaagtagcagggaccacaggcatgcaccaccatacccagctaatttttcttattttttgtagagacagggtttcaccatgttgcccaggctggtttcaaactcttggactcaagcaatccaccatcctcagcctcccaaagtgctgggattacaggtgtgagctaccatgcctggtctcattgtggttttgatttgtatttccttcaggggtaatgatgttgagcatcttttcacatgcttattaaccatttgtgtattttccttgaaggaatgtctattcagatcctttattcattttttatttgggttgtttgtcgttttaataatttttaggagttctttatgtattctagatactagtccctcattaaatatagggattgcaaatgttatctcccattctgtgtgctttttctttttactttcttgatggtatcatttaaagcacaaaaygttttaattttgatatagacccgtttatcaagtttttcttttgtggcttgtgcttttggtgtcatatctaagaaactaatgcctaatctaaggtcatgtagatttattcttatgctttcttctaagagttttatagttttaactcttacatttagatctatgatccattttgagtttatttttgcatatgatgtaaagttgtgatccagcttcattcttttgtgtacagatgttcgcttgtcccagccagtaccatttcttgaaaagaccattattttctcattgaattatcttggcactcttgtcaatgtcaaggcatttttgtsataattattctcataattattgtttgccatatgagtaacacaggttaacaaataatgattagctttattgagtctcagttaggtgttaggcaccattctagaagatctccatttagcattcccagtaactatgaaataagtactgctattatcctcatttttctcttaaggatgaagaggcatggaaagattaacttggcaaaggtcatacaggtagtaaatgttggacgcaggcttcgaactcaggcaacctgactatagaatctctgtttttagacatcatgctgtgcctgactgtgtcttgtttataggaggaggaaaattttaaaacagcccaaattctgttatccagagaagtattgtcaaaattttcatgtatagctttccaaactttgttctgtacaaaaaatgttataataatgggattagactacatatacattcttgattttattcactttattgatgtatcattactaactttccttccttctatatctaaagcattattcttaatggctacataatattctacctcatgtctgcaccattactgatttaaccattccactgttattgggcagtcaggttgcttctgagtttttcatttataaacaatgttctgatgtatgtatctttgcacatacttctatttatattctttccattgttttctttaagataagaaaaaattcctctagaagaaatgtaaagagtatggaaaaacatttaaagtttttaatgcattttgaaaaattgttctctaggaagtttctacttatttacaattaatgttttataattgataggttactctgatactgattcagggtaggcaagcycccactggggcttagctgggaaggttcttggctttgccaaggaaaaaattcaagggtgagcctttgaattctttccttctctaataaagaaaacagctttattaaagcggcagtgttataggtctggcagtgttataggtccagcagtgttatggctcygtgacttctcctgcagagcagggctaccccatagggagtatgctgagaagtagcagctcaggacagttctgtagtcatatttattcccacctttaactatatacaaattaaggagcagtctgcagaaattcctagagaaagggtggtaacttctgggtgttgccataacaatagkaaactgacatggcatactgatgggtgtcttatggaaagccgtttccgccttgtccctattttagctagtcctcaatttggtccagtgtctgagccctgcctctggagtctagtcctgcctcttatcactttagtgtgaatctcattgattctcagtgagattgaacatgtatcaatgattattataatctttcttgtgtgaattacctattcatatttttacccatatttccatgaaaaagctccttgtatactaaaatattaaccatgtatcttttttttggtgttttcctctagtttgtcatttttctttaaaatttttgggaattttttgatgtatagaagatttaaatttccaagtggcaaaatttatcagcaaaaaatatacatctttttctttatggcatctttgtgtttgaaaatcaaaggtcaaaaaattgtttctagctcttgtcttccatgagctagacgttggtggtgggtggggtggggggcaggcagaaatatgaggaatcatataaattgtcctttttatttccgctgcatgttttatcttaaacattgattacttgtagtcccttaactgacagggaaataaagcatcagcttaaccatttggcgttaacaatgtcagtagtgaggccacctggggtggagaattagtgtctcctcccagttgtatggttttcagcaatattttcctccctgtggttttttttttttaaactcatttgaatttgctcctagcatgaatacatgatatattagtccattttcatactgctgtaaagaacttcctgagactgggtaatttataaagggaagaggtttaattgactgacagttcagcatgactggagaggcttcaggaaacttacaatcatggtggaaggtgacagggaagtaaggcaggaaggagggcaaggcaggaaggcagggcagcaggaaggagaagtgccaaacaaagtgggaagagccctttgtgaaaccatcagatcttgtgagaactgagaacatgagaacagcatgggggaaactgcccccatgattcaattacctccacctggtctctcccttgacacgtgaagattatggggataatgggattataaatcaagatgagatttgggtgggggcacaaagcctaaccatatcacatacaaatgacttaatgtgtatgagatcatagggacttttgtagcaccattggttagaaaaatcacacattatccaattarcgttaaaaagacatggatgaaactggaagccatcattctcagccaactgacacaggaacagaaaaccaaacactgcatgttctcactcataagtgggagttgaacaatgagaacacatggacacagggaggggaacaacacatactggggcctgtcggaaggtggagggcaaggggagggagagcccctaatgcatgcggggctgaaaacctagatgacaggttgataggtgcrgcaaaccaccatggcacatgtatacctgtgtaacaaacctgcatgttctgcacatgtatcccagaacttaaaataaataaaaaaaaagacatatatttcttcaagacacagtaaataaaagttcttgagagtgtatgcttctacacaaactagatttgtgggcgttaaaacaatgttactttttcagaaactactgctgtgatagggtgatcttttgaatcacattgtaccagaatttttttttttgacgttatagcttttaaatgttttcagactatcttcttactgacttgacatttaatacctttggcatgtgagttttccttatttcgttttccagagtctcaggaaaatacttgtgtgtcttgcctgtttaccaattattgcagtgcattgcacttttttctgggtctggtctttcagctacatattgtgaaggtgctatccygaccagtctctttgcataamcccacagggccacccacgtggtctatgggacagggataactcattagggctttctttgtcttctttcttgagggtctaagctaagcagcacatatgtaaaagagctttaagttgaaattcttttgagagktgtgtgtattttttaaaactggaaatgcagttttaccaactgcagytgaggaaggcccacatgtaaaaagtaaagtagaggttcctcttcaaagagactttcctcccatctaattaagaataaataataacttctcttagaagcaaaatgtattcaaagacctgtgctaacattcttaggtatctgctagccacaataaataaatcaatgtactttgtgtccttagctcccacaatttagccaaaatatttgccctggygtgcttataccagtccaagcaagcattaggtcatagcctgttcctttccttatttggagatgtttttacctttctcagcattccacaagttacttcgtccttcctttattctcctctgcctttgcctcttttaaaaagttctaagttgctagccaatcaggacaaatacagaatgtgaggtcccattccagccaatggaaaccagacacagcagtagggtggatgtgtcaagttataaataaccctgtctcctttcttcagtgtattcttgtggcaaaactgctggcaagtgtacctttctgcagaaagtaaaaatggccttgctgagaaaatttatgttcaagtactatttctttatggcaccagggaacaagcatttcaaacacacgtgcataaggagtgttattttgctggtacttcattattgtctaaactgtttgtgtttctagtaggggagatcatgactcatatttgaaaatttgattttagataattaaaaaacttacttttgagtttcttccagtgcactctttaccttatcagagctcgtgtatattaacactatctgaaacactgaatgagaaagtggggaagactcagcttttcaggttctaaaaatatgagttgtacatcttggctttcaaatttgcttttacaggacattagaaactaagaacaagggactttattgttgttatgattaatagctacagttgattatcttttattttcagggattgaattagttatcagttgatatccacaataatcctgtgaaatgtatgttatgaatgatcattttacagctggaaaatgagaggctcaaagataacttgcttaagataacaaagttagaggtagagccaggacttgaaatagtaggtcatttgactgtggaatgcatattttaaaatcagctttattgattacatatacaataaatagcacatatttaaagtgtataataagttttgacatatgcatacaccaaagcaatcactatattcaggataaagatcatatccatcacttccaaaattttcctcatgaccctttttaatgcctccctctcccccatatgcctatccccaggcaacgaattatctgctttccagcactgtcaattattttgcattttctagaattttacatacacagattctgatatgggtttggatgtttgtcccttccaaatctcatgttgaaatgtaatccctagtgttggaggtggggcctggtgggaggtggttgggtcatgagggtggatccctcatgaatggcctagttcctacatccacttggtgatgagtgagttctcactcagtgagttcacatatgattgggttgtttaaaacagtctggtatctccacccctgactctggctcccactcttgccaccacgtgatacaatgacttcttccttcaccttctgccatgattgtaaacttcctcactagaggccctcactagaggccaagccagtgttggtgtcatgcttcctgtacagcctgcagaaccatgagccagctaaacctcttttctttaggaattacctagcctcaggtatttctttatagttatgtgaaattaacattcatatagtgtgctcttttgcagcttacttctttcacttagtttgactactttgacagtcatccatgttgttgcatatatcaatggttcattccttatattgtggaatactagttcattatatggcttatatatcacaatattctaatttattcactgttggctggcatttgggttgttttcagtttggggctgttatgaatatagttgctaagaacattcatatgcaagattttgtatggatataggctttctcttctctagaagagatacctaaaagtggaatggctacatcatatagtagctgcatgtttaatggtttaagaaactgtcaaacttttttccaaagttgtaccattttacattcccatcagcaggatatgagagttctagtcgctccatatccttgtcaacacttggcacaatcagcctttttaattttagccattctaatagagaaaagtttctcattgtgacttaataattgtatttctgcaacatctaatgatgttgagggtatttccatgtgcttacttattacctttttatcttctttggtcaaatatctgtttaaatcctttgctcatttaaaatttgttaatttggctgggtgtggtggctcatgcctgtaatcccagcactttgggaggctgaggtgggtggatcacgaggtcaggagatcgagaccatcctggctaacacggcaaaaccctgtctctactaaaaatacaaaaaattagccaggcatagtggtgggcacctgtagtcccagctacttgggaggctgaggcaggagaatggcgtgaacccgggaggtggaacttgcagtgarctgagattgcaccactgcactccagcctgggcaacagagcgagacttcttctcaaaaaaaaaaaaattgttaatttatttaaaactgaattttaagtctttgtatatttcagatacaagtcctttatcagatttgtgatttgaaaatattttcttgtggtctgtggcttgtttcttattttcttaaccctgtcttttgaagagtataacattcttaattttaataaagtccagcttattagtttctttttttgtatggattgtgcttttgatgtctgttatgggttaattgtgtccacctaaaaaagatgttggcatcctaaccccttgttctgcagaatgtaaccttatttgaagatggagtctttacagaggtaaccaaattaaaatgaagtcattatgatgggctctaatccaatatgactggtgtccttataaaaaggaggaatttagacacaagtgcagagggaagactgatgtgaagacccagggaaaagagagccatctccaagccaaggagagaggcctggaacacgtccttccttcactgccctcagaaggaactaaccttgctgacaccttgattttggacttctagcctccataattgtaagacaataaatttctgattttatagtgacctggtttgtgatacttttctatggcagacattgcacactaatgtagtgtcacagagattttctcctacattttcttttggaacttttatagttttaggatttccatttaggtctatgattcattttgagttgatttttttatgtggtggcaagtatggtttgaaactcaatatggaaatttacacatggaaatccggtagtttcagcctcatttgttgaaaagattatctttctccattgaattgctattttacctctgttaaaaattagttttctattcatgtgtgtatgtttcaagaccctctattctgctccattgacctatttgtctatcttgatgctaataccaatctgccttctttactttagctttataataagacttcatatcagattgttttagttcccctttgttctttttaaaaattgatttggctattttaggcctttggcatttccatatgaattttagaatcagtttgtcagttgttatagctggattgtactgaatcatagatagatttgaggagataatatcttaacaatatcacgtcttctgacctataaacataggtgtatctcaacattattttagatgttgtttagtttcagcgatgttttgtagttttcattatacaggtcttgacaatctcttgttagatttattagcatttcagattttttatatgactatagatggtatttttaaatttcaacttctgattgttcatttatagtatccagaaatatagttgagttttatataatgatctcatatcctaaaggcttattaaactgattgatcagttctaatagctttttggcagattccatgaggttttctacataaaatgtcatgttgtttgtaaataaagacagttttacttcttcttttccagtctgcatacgttttctttcttttcattgccttaatgcactggatgcaaccttcataataatgttgaatattagcagtaagaggagacatccttgtctcattgctgatcttataaggaaagcattcagtcttttacctttaagtatgatgttgatcaggttggcaccttttctctgaaaagtacaaggtagtaaatttttggcttgaggaccacagggtctccattataactactcactcagatgttgtagtacaaaagcagccatgtctttctcatatgcatgcgttcatccttacttagctggatactcaagtgggattctttgcagatctctctatttagctctctttatgtagctctttttttctctggtatgctgtcctgtgaattctaacttycttggtcttcctggaaccccaactccatctcctgactcagagagttcactgggctccacctgggttacttgtgttggactgagccctggaaaccttcccaaggcagtaagctatggcaaccacagggctccctgtctttgtttcgcatatctccartgcaaaccttcattgcctgttccttgtggcctgatgtccagtgttttgaaagccrttgttttatgtatttgtatgtttttagattgtttcttatgggaggataaatctagtcactgattcttcaytttgggcagaatctgccatattttcccccataatcttgcattattctgtatcttggttaagagtctagtcatcattatctaacttggaggaatctatagcctttttttttgtcttatgatatcaaaatatttttgaacccttcatttggacctttaatatctattgatttacacgtaakgtaaacaaacttttgtaacttaatcaatacatttcaatatgcttgtatttgataaaacatggtagcatctatttgatgctgaaacatggcaaagcatatgttgttatatagtcatgtctttttttttcagttcactaacagtgcagatgtgcgtatgaattcacaaactcctttgcaataatcgctgaggttccccagatgttcttgcagcccaggctggaaatcactagcctataggatttttatgtgtgacatattgactggaggtgtccttcagttcatggttaatttgaaccagattttcatgkgtcttcaagttggtgacctatgaaatagtgttgtggtttaaatccctgaacccartagtagggaccaaggtggacctggcaggtgcacttgtactcgagtgtagttcatcagagactggacctcgagttcctttgtctacccaaggaagacatgtgtggaaaggatccttaatggaacgtgcctaacctagaaaccttgatgaacagtgaaggtcaagcctagaagtagcatcaagtcaacaaattcagaggatgcaagctgtgatgaaaatgggaggcagtcaagaggcagaaactaggtggacatggaataaaataccagtggtttggaagctaagccagtgaggtagtggcatggggcttgatgcaaatgccactagatcatccatagctgcttttatatctggcatgtagctcatgggtagattgggtctgaatagccacagggttatagaagacagctgtataggagtttttgctgtaagtattcattgaaggaatggtggaaaacaataccaaaaaccatgcttgaattgatatctggatattttgtttgtagataaacatttttaccacttatcttaaaagttctctgaaatgctttgttctaaaattcctattatattagcttctactccccatgatagtctttctagagagaatgtctcaaaaaataatagatctgaccattcagtcaacaaacactttttgaatccctgccctgtgccacgtactgttttaggtattgagggtgcacaaatgaaaaataaacaaatcaatgatttatttgagtttccatgctggtagaatgaggcataagataaagaaaataaaaaggtaaaatacgtggaatgactagttgtgctcaatgctatggagaacaataaggctaattgggactagtgacagtggtagtggcattggtggtatttgtgtgcaaataaatatagtgtggacagaaaaggcaaagacctgaagtggctgaacattatatctattgtcagctatcttgatgatttgtctcataataagcctccatgatattttaaaaaataataattcaagccaccttttacacatgtgattccttctcgtggcctcctttgctcatattcctgatcccagccacaagagcaggattgtaaaactgatctgatttacaatatcttaaaagtcagtgggctgaagctttgctagaaaaaaagtagagctaggaggccagtgtggtagacgtgctgaggtggctctttgggggaaaagagttagtgcgacatttttgagggtccagcttattttttaggacacatggcctatgtacagacagtggtactgaacagaaaatggcaagcaatggactctgacacagccagataaatttgtctttaagatctatttgggtcctaatagagktagttaaactaatttgataaaaaataggttgctgatggaattccaaatttcatactcacttatttagtcatggtgcatgtacttaaatgtcataaaaattaagataaatcttggaagacataggactatgattacaccaaagagcatcacagaaagtgaatgtaacgggggaggtagggagtcctctaccactgaagtattgatatgccagatgctgggcttttggtacttttgtcttgcttaagagcactgtagctggagggtggcagagccaagatttagacctgccttgggtgactccatagatggagcactttgcatcatggcactcttcttttttactgtctttggtggcttcatgggccacaatttctctctgtttttcacctttgttggccataagtgcagctctttgccagcatcaaccacgtttcttccatacccagcttgcctgtttatggaatttcatcacggttttgtttcctgctgtgcctatgagtagaagaaaaacattccaacattgagctcttatccttctaagggaaatggcatcactgcatcttgtactgctagtaccagctgtaagtgatgggcctggcaatggagccctccttggacacagggcctctgacccagttctactggtggtgtctgaaggatctgacacccaaaccatggcttatttcccctgtgaacattcaccactgtagaaacatttcgttcctgtaaaaagacatcttatatcctctacccctgtattgtatagtgtgggggaggattttctattttaagataaataagacaattttttttcaaattgatcagccaatgccagagaacattaattcttttggagagcattgttcctataaagtgaaactactccaccaaattaacatgccaaaaaaacaagaggagagctstttcaggcaaagaagtagaaatcaattacctgaaaaaatttcaacggtatttattttaggtgattttatttccagattaaacaaataaaactcctgtgtcttttcttacctgtttgacttttcagtcagaactaatggaaccaagaaaggaacaatagacttattattgatctgcaaaaagaaaaggcccctaaagaaaggcaataatgacattttaaagaagtgactcttgaaaaaaatatttttcatgaatactttaagatatcttttatagtactggaaaaatttgatttaagtctggcttgaacatgtaagtgtgtctgtaagtaacagtacgtgcagaaaaaaaaggtagcaaatgcagattctgaatctgtacaaaacctgtttaaaatgcgcacatccaaaaatgccaaattagcagtagaccagaaacaacccccaggactgtggatgtwtgcttagtgttgaagtgtctattctagttctactcttcaaacacaccagccatttgggtgtggttccttctagtgtgattggaggaaccccttcttttatactaatatacactcatacaccccttcttttacacagttaaaattctggatctggtgaggtttgtgtgatttctcagatcacaattctttttttttttttttttttttttttttgaaatggagtctcgctctgtcgcccaggctggagtgcagtggtgcgatctcggctcactgcaagctccgcctcctgggttcacaccattctcctgcctcagcctcctgagtagctgggactacaggcacccaccacaacacccagctaattttttgtatttttagtagagacaggatttcaccgtgttagccaggatggtctcgatctcctgacatcatgatctgcctgcctcggcctcccaaaatgctgggattactggcatgaaccaccgcacccggccagaatctcaatatttttatccagttgtgaatgtgaaatgagatgatgtgagtgggcacttgataaaaaggggccattcatggagtaatgatgagagttcatggccaggggttttgatcaattcagtctaattctacggacctgaagttcaatgttttaaaggtgctctataaccaataaagtgctatggatcagtaaaacattggtgacggtgctaggttgtaggatatgcactttgagtccaaggaggcaatgttttatccatttcatcctccrtaggagctagcaccaatatgaacacataatatgtatcaaataaattacctcatggaaatcagaagagacctcagttttctctaacaatctagatttcttcacaagtggctcttcaaatatgttaaaaagtgtattctgttctcaataatttagtattaaggaaaatgtacctaatatgtgtacttgaactatttctgtggtatgtgatagaaaatccatcttaaattattataagaaataaaagcacaatttattaacaaaggaattggagaatctgagagcatattggatttaggtttgggttgatctgggagctcagatgaaggcatagagaccaggtgtcttactccatcttcctacatccctgctctaaagaggctctgctctctgccaggcttatctgttgcagctaggcctcacaagaccccaggttcaaatccagcaggaaaaaaagtctctagtaactcttgcacaacccccaggactcacttggactagcggagcttgggacagatgcttatcccttaacagttcctgaagagtattctactgccagaggaaaggaggagtggacgccaggtrgcctgtatgcagtaagagtccactccatctatggaccccttggttaccttttccaggcctttgtagctcactcctcctcaggtaaaatttagagaagtgatattatttttaataagatcacgagaggtccaaatagtctaatttgttatattggtttttttttcaggttttttgggggccattttgtgttcataggcagtaaaacaacagaggttttccccaggtatctaaactgcacccaaaagtctgacaagatctttctagtgatcttgggatgcagggatttgggtgccaggaactgagttcgagtcctcattacctgtcttggctgtggctttgtggcaaactgatcaatatggcttccacagagctccacatgaacacgtacagagcagccacgttacattccatacagtgggaagtcttcacagatgcccctttctcatcattcacatttcaccttgttagaaaggtcttcctcactcttcttaataaaacattgttatctgaaattagttgtttatttgttttttgtctactctcactaactccatatgagtattaaaccccataagagkaaaaatgtttttctatcttctttccttcagtagccacagcrtctgaaacagtgtgtgacatatggtaggcactcattacacagttcctaraacatgaatgaatggcttctaaaaccatttttctacagtctctgtagaggcagtaggtacaaactgtgttttgtaaatgaggttggattgaatgactaccatagctgaatccagtcatagctatgttgttataatggatgggccatgcaatgtaatgaagtaattractccctaagtttgtactttatccaaaagacatattactggctttaggtgaggaatgagtctggcttccatgatggatggaacttatatttaaagacaataagcattgtactatacagtgttttatcttgaaccacacagttgcatctgaggacaaatgtgattgcactatacagaaacagaataaggtttgtgattaatgcactcttggagctcacaatctcaccatctaytcgcagagatattgaagtagtagttacttcactcacagaattctatcatagttcctggaaatgagctagagtttcccttgtcaattcctttatgggtgctccattgccctaatctgtgagaaaaagaactgattccagcaagtgaactcattaaagggagtctacatttccttattccagagagaagctgttgattggatctctgagtagctctgtcgtaggctgggctccttgatgaattgaattcatttactcaaatgtgcaggcttaaactttgcagaaatgaaattgaatgaccatcaagagaagctatagtgctgatggtttagtatattagtagacctcagagcataagttagctttatttatagatactacttttgtggtgaactatctaaaaggatatcaagaaaaagaaactgaatttcaattttcagaatattgcttgtagttatcactctgttagtccaaatgatttaaactttttcattccatgttgacattttaaacaaacacatatgagcactttccaggtactaagaacctgttttggtttcaggaaatacccagttcaaaggaagagggacagatctgtacaccagtgattttaatatatattataaatagtatgatagaaatctgtgcaaaatttcataagaggtggcacataattcttattgggatgggggtggtgtgtgtgtgttgtgtttattctctggctatggtttttgtttaataatactggaaacaaaaaccacacaactaacatttgttaagtgctttttatgtcaggcgctgttctaattactttttcacctatactctcatttaatccccgaagtggactctgtggatcacaggtacctggatcaccccattttcacagatgaggaaactgaggctcaaagaggatcaataacttgcccaaggtcatgtggaggagactaccttcaactaggtgatatcttgtcagccatcagcccgccagctccatggtgcctcctgctttggctggktagcaggactctcctgcgtgtgctccctgtagatatttatgaatgtgtttcttttttttactcgcttcatgtttgtaatccatgaacatgtgtgtgtgcctctagggtgacttcattagtgtcaggggagaaacttacatacatatgtgtacaatgaaatagtgttgttgacctgttttagaaagctcacatcttagtagttcccactgcagtttttactggggtctctcttagtcttcagcactaagtcagatctattgcggttttttgttgttttgagacagagtcttgctctgtcacccaggctggagtgtagtggcacgatctcagctcactgcaacctccacctcctgggttcaagtgattctcctgcctcagcttcctgagtagctgggattacaggaacctgccacaacrctcagctaatttttgtattttagtagaggtggggttttgctgtgttggccagactggtctcaaactcctgacctcaagcaatccacctgccttggcctcccaaagtgctgggattacaggtgtgcccagccagacctattgtgttttaatgcttgctgatgggaagttctgccttggagccttgggattttgattttgattgagctcctcccctaattttttttttacttttttacatgacacctttttcgtcatctgcaaaatggagataaggatgcatttactccctcaatgatggggtcgctggtcaggtcattcattcctgtgggtgttggtttagtaagtctgcagtgatgaactcctttatgggagctggtgtgtacgctgttactccagggccagccctgatgggagttgtgctcatggagctcacagcctcacagggaagatctcatgcacataaataaccgtaatacatgataataatacaaataataacaggagccataggcagctgccacttatcagtagcttgctatgtatcagaaatatgtacttttatttaggcatcagaatcaactcctgatatgggatcttttgtttatttttaaaactcacttaaaaaacagcttttaaaatagtatacatgcatagtaaaaacttaaggcatacaaaagtgcagtaagtgaaaagttggtattttttccactgtagatttctcagtcctattctccaaagaaaaatcaccataaacrttttcttctgtattctttaagaatgcttrttcacatgctggcatatatgcctatccattcttttacagagtgtgattgtattatgtacaattctatgccttgttttttcacttggtgtttttgctgtctccaccctccccatacatacacacacacacacacacacacamgtatacacacacaggcacatgtatacaaacgtggagagatcaatctcgacctttttatttttgatagcaaatagtagtccttttcagggatgagtttaaaaaattatgtcctgtgaaaatattctgtaaaagcaaaaatatattcaaaaaagtaaatatattccatatgaaatggtgtgggggctgtattggagcttgaactaaatggcatcagaaaagggctctggttccagggtaccrgacatccccggcagagaatggaggctggaggtggtaatgggcaaggctggggatatgaagagtcccatgggacatgagcgtgtccagggctcatcttgggcacctgccccatgatgaaagctccgatttccactcctctggctgtgtttgagctggtgagagggttctgcgatgtttgtgagtagctcaggaactgagtgaagcagaaacagataatgaggggtgtggctgccatcatgggctcaggtctcccataccactctcctgcctcttctgtgatttctccctttgctccacgcctatgccttctaccccaccagcctttcctggtgaaatcctgttcttctttccaaaccttcccccaaccatcttgtttccctcttatagcatcaggaatatagcagtgataggagcctacttgtcttgagttctcactatgcgccagatgccaccaaccattctgagctcgttgcatgaatttactcatttaatccttaccccaccttttaagagactgttatcaccattttacagatgaggaaatctgaggcacagaaaggctcccccctttcctgagcggtgaagcccagtttacattagtacagtctagttatactgccggacgtcaccataactgctgtcatttaatcctcacagtgaccgtgaggtaggtgtgggtatctcccttttcacagatgagaacatgggagctcagaggggctgagcagcttgccaaatttgtgccataggtagtggcagaactgtttttgtaatctgattctctcaactctccccctaactccctgcctctgcatggaaatctgtattaggagcacttgtgcctgttcttcccaccactcctggggtctccttttctcccccagcaacagccatgctcagctgttgaactcagtaaataattgctgaatgattaatctctctcatgactgctctgtgtgtgagggttccttaattaccaaaactttaaggcatgtctcattgtaaatgttttgaaattgtatatggtaaagtgtaaaaacatgtggtgtgttaatgttgatatctcaccttgagttcatctgtctcttgmctaaaggtgtttttatatccatgtagagtgccttttactctatggctcctgatctgccatgcmatcaacagatttaataatttatcaatgtcatatgaggcttatcttgaagctgagtgtgaagtggcttcagggtcagagagctgggtcttgcagattcctggtgctttttccaggctctgttgggctctactgagcatggttttgcacagttcccctgcccttaccctggctgtgggaccctgggataggtgtttgaacggagttgtaatagtgtgtgtcagttatgttggatcattttcccaagtgtaatttgagcgtgtgcaacctgtgatatgttcttatgaaaagcacatttgcatattaatgtatctgcattttgattctaagccctttacttccataggactgtgccctgaatttatgcttaggtctgagaatgtctgtgagttctagaggggctgtgyctgtgtctgatatgactctgcccccaactgtcccctccccacatgcctagcacagtgcccggtacacagtgagcaagccagaagtactgartgaatgagtggttgtgtcttcaggaagatgagtaagggtcggcataggaaagagtttctgaaaatgttccaagtatatcagttcttctgttactgagccccaaatttccttcatgtttcagtacttgcaaatgatctgaggtttttctggcagcccagtctttaggaggtgacacagcaacctcagctgtgacctgcttggttgcagtggattttgcatagagagtagctgtaattaaactgttgatttggcttaatgctgttgatttgctttcatcatttgagaaaatgtgcagatattataaaacttgccaggggctgggatttggctgtggaaataaattttggttaattatttagctaaagaacttttagtattagaatttttgtgttaatgaaattgttagttatgttcaaatcatgatgtatatgatgactaaattaycataatttttcttctaatggtcattttctgcttctgtccctttaactgtgttatagaccatatacctgattatgaaggattatttagtttaacagttcttttatggatcactaatataaacttatagttgtacctagatgtgtacaagtatagttgacaatgatcattcrgtatattacctttggtttcctttgcaggaattaattgacataataaatgcacagaggcctaccatagagtcatacatatggtaaaagattggtatgtatttactaatgcatccaataatgcatgcattcatttttccatctggtgacaatgctattaaaaataagacgtttctggctgggygtggtggctcacacttgtaatcccagcactttgggaggccaaggcgggagaatcacgaggtcaggagatcgagaccatcctggctaacatggtgaaaccctgtctctactaaaaatacaaaaaatyagctgggcatagtggcaggcacctgtagtcccagctactcgggaggctgagacaggagaatggtgtgaacacaggaggcagagattgcagtgagccaagattgcgccactgcattccagcctgggcaacagagtgagactccgtctcaaaaaaaataaataaataaataaataaaaataaaataaaataaaataaaaataagatgtttctaacagccacatagaggcattttactttttggtagtttttaaagtaagggacatttattctcatatattccaagttcaaattatgctcccgtgctctatgatgcagagttttggaatcccaattcatcgttgtctaagcatttgagagggtcacatgtacgttttctttgagacaaagaaatggctttatctacaatcatgccttcagccaaccctctctgtgtaggtgggmtggtccactatctgggtgaaacactcaaataatggtaatcccactgcttgacaatgggtgtctcaaatatcaagttatctttgatgagcaacagacagcatctaccttttaggtacttaccagatagctgagtcttgacaccccttcagcaactccctcattgtgttgacaccattgtcagtataagagacaggccagctaccatccccccaggttctccaagctctattgttgcctctaactggcaatttattcagaccattgtagtatctacgctttctgtggaaatgcttcaagggcattagggctctgatttttgttctgtccacaaaaagacctgaatccaaccattgtgagtgggggtgagggatgggagtggaaccaacatttcttaagcatctactagccagatactgtgtaagatcctttacctgtgccatctcatttaatcctcatgataaccttgagaggtgtgtaccatcacctccattttagaggtaagaaattaaaagcttgaggtgcttaagtaatttgtccaatgttgtagttcctaatctgaacccagtcctgtctactaaaaagcccatatccaaaacttctgtactaacttgcttcatgaagcactgtttgttgttatttaatgttttgtcaatatttgcccacctattagtctatctgtatatttctatgcaataaatttttcctaaaattcagtccagagagacctatctttctgtgcactgataatgttcctttttctttgatggtgaggactatgtcacttctcattattctctttttgcttgactgcagagccagattgagtgctcaattgcagtaattctcatctctgatatctggtactatcacctccctctttctttttagaatttcttattgctgtcttttctcttttttaaactacttcttgagttttcaaatatttcttaaaataaggtataaattataaaatcactataacatttttcaaacagttaaacagatttttcatgttggatgtcagttttacaatgtgcagcagcagagagatgttggatccatttaagcaatagtttctatgtcctgtccttccattcacaggtgtgtacagacacttacatgtgcacacacacagacattagtaggacaagccccttgaggctcccagcccatggcttccatgtgtctgtcttgtgtgaccttagtctcactgactttattctataatcgcctcatcagaccaaccaatccttgtaattaataggtcacccatccaaaagacactttcccttttgcctctctagtttcctcttatgaaagcagttttaagagaggcatttttctgagtgygtaaagactttatatcagagctgctgccttgaaatttagttttgaagatcattgtgggtgatctttattaagtctttcaggcctgtaagttactgttctagcttggggctgggctggaggggtatgggcggggtgggaaaactttgctccatccagggatgcaaagtccatagagtaatcacgatgtttcttcctcgtgtgcccctccaagctctgttgcaagggagacctatgttgccagcttctctctctctcaacttggtttttacacccagtgaatgcatggaagtgtgtgtgtgtgtgtgtgtgtgtgtgtgtgtgtgtgtgtgkccggaagcgtaaagagacagatggttctgaaggctggcacagagtggaagcttcctgctaaacagatgtccctctcggagtaatgcaggctgcccaagaaacctatgctttttggctcctgcacccattgccaagggtcgttctactctctaaataggcagcctgaacttcaagtagatggagggaatgtgggccagccagaaaccatcaacaaatacaaaggcatttttttggcctgaatggtgataaaagttcagaattgatgctttttgtttgttttggacctaagatttggtgccctttgctaggagaccagttggcccgtcagctctcagcagcattcactctgtgtagctgtaaaactcttctaggttctttggggaatttcaaagttgagtrgaaaatctattcttgcccacgaggaactagcaattcaataaattttgccaaagccaaaatctagaggcaatgagactaaaacaaacaaagcacaacaataaaaaacttgatgcaaaaataggaacataatatgataattatgttgtaattttaaacataattttaaaaatggtttagtgttaaatggatttagatgtagagttggaaaaatgttgaagaaatattctctgctgtaaaacagggcttctgggcatagcaggtttggtggaggatgaatcattgcaggtaggcgtgcaagtttgtgttttgggtcttcaaaacaaaaattgcgtaatggactctcttgtccatcaagcagttcacaaaatagacctctgaccaagaggggctgcagtggctctctcccttcctcttctcttctcactgtaattttaggaaccctttgggcagtagctacacctatagttaaagggaatacagraagtactcaggggaaacaaaaaactgcctttctgaataaaaatatggaagagaagaaatgtccaaaatagcatctggaaacaaacatttttatgaaactagcaaagatgcttgtctccaggacagacctgtttggtatacaagactgaaaacatttctaattagtattatcatggtcagtcctgaccacatgggttttttttgttccatggttaaggacccaagttgttgtagaaaggcttttactacattttcagtagggccaggaattttgctgcaktatggacttattggtaaacaagcatttgttaacaccttctgctgttgttttacaagccaggtaagagtggtaactgaacagatattctatgcagttactctttgtaattgtgccgycactcttcctggatttgcctaaggttatgaaacttgggctggattcacttcttttgcagatatttttttcaccttctggggaacttgtgaaggttcctgattcacagtttttgggcctgtgaaacttaatgactgagggagagtggaaagtaattaggttccttgcaattatgattatggtgaggctacgaagaactcactttgcatagcctgctatatatagttcaaggaaagccatgccttctataatctcacttaaatttggcaatcttggggtgggcagggcatatttaaaatcttgcacttatcaaataagaaaactgagaggtcatagggtcatccggctcatagatagcaaacctacttttaaacccagttttatttcttattccaagttcaatgctattcccatgaagcacatgacctcttaaaattggtactttttattttgaaatgcctcaatttttagtatttaaaaaagttttggtatctttttacaaaaaggtagttttgagaatatgaattacacatccaggtgagaaaactaagacataaggaaatttgggggcttactcaagaccataaaataaaattagatatagcatatcagggaattggtgaccctttctaccacacattgtgattgttgctttgcctctgtatgcrgctctccttgggcttggtgcacttgctactgctttggtgactctcaggaaatacaggaaaatgggacttatatattagactccaacactgattcagtagcaacatggaatttccactttctagttgcccttcattggaggttatttattctatcttctacacagggaaattgggaagacatatgggttgtttgctttttaaagcacatactgccgaaaaagggaaaacccagggctattgcatatygccagttataaaaacttttgttgttgttaagggatcactttagttcatcattttctttttactgatgaggaagaaactgagaaagattaaaagacgtgtcaatatcacaaagtgaggataagttttagcagagcttaggccttctgattttgtttcattcattttttactgtatttaatcttttgtttatgttggaattcaagctatttgttttttactaatgttttctatgcttctgcaagattttatgagactccccagttcaaaatttctttccttaattttccacacccaagccttttatatctataacttttatattttgcaataagaaaaattagacttatagaggctattcatccatccgcttgctttctaattgatcacttaggagacttgtgatatgccctccatctctgtgcctctctttcttgttcccttctaacttacaattccctgtaactgcagccatacccttctaggctccctgtctgccctccttattccagtcaagcttggactttgatcctttgcttatcccagaatgctttgttccaaacatctttaagccaacctactcaaatgttagccagaaaacagcaattatctattgagctaaacattcatactgaatgatcaggaatggtagcgttatgatcaaatagggaggaaagtcacagctattctctgagagaaagctgagatatattcacaacattggtttatattatcttagtgtgaaaccacttaaatcttaacagtacatgttgggatgtattggaagaaagacatcacaaaagtaattattgactatgaaaagcatccataagaaatgtttttagagcaactactgtaaactaatcagaatataattattctagacaataccccaagtaggtgccgatcgtttgatatgaggattagagataaaaacttcattatgttccrtataaaatgccagtgcaraatggaaaacaataacacttcaactaactatattgatatttatgcagtgtcttccacccaagatcctgacaagtgctagtaagctatcattatgttctctgtgtggcaatgaacaataagggttcagcatgtgtttgtttaaaaaagagtcatgcttattaatattgatagcataatatttggaaactatattattatgcagctataatgtaaccatttattctgttctgctatcaagccattgaaactgagctctgcccaatgactgcatttgcttgacttagggttgctgtacttatttgttggaggtaccctcccatatgtaccctccttcagacctcaccagcctatggatgcaacatgaaccacatcaagggaattcacatttccctggcttacatcccactgaggtctcagcatcacatccctgccctccaacaaagcctttcctcatttgtttgggaagtcccaggagtgtctcatatgtgatcacaaatcatagttttcctctttgaacccacctttccctgatgtccaaggcacttggaaacaccaggtactggtgcctccttcattgttgccaccatggctggtatcctctttaggaacattgcttccttggctagatatggactcctggtgtggtcccttgggtgtcactgagctggagccatgtgtgttttgtgcacacacaggaagtgtttcactcctatgcttgctcatacccaggatatccttgtgaaaccacagcctcagtactgctcttctccctactgggcttgggcctggtgcatgggatcccactggggaacaagtcattctctttatgctcatccctgcaaccaagtcctttttcaggccatgctgatcagctcayggaaacagaarcctccctctcccttttccagattaacccagataggtctggaaccaataggaacccgctaacatattaccagctaaaaacaatagctttgcgtctgttaggataaacacaatgattcacactgcagaattggtgtgccagaatttttgcaggctgtgtccagggaaaaggaagcaggttgttaagtatgctactagtagaaaaataaaacaaaccactgtttattgagttcttcctattcactaggccatgtatttactacttactggctttatacataccacacacatacgcatatacacagacatacacatactttatttaattcttcaaccctacaacagaggtcattttttccrtaggccaagataggtaacaggtgcagaaagccaatggaggaatggaagggagccattatttactgagcacctgctcggtcccaggctttacggaggtgcattgcatatgctgttttacttcatcctcacagtgctcccaagccattccccttctgcaggtaactatgtgaaggcaaagagaacataatttcttgatgactgcagagctagtaactggtaaatctgacatgaccctagtctgtttgagttcaaagccctagctctttcctttgtatagcacgagagcctcagagacattgcttgactctgtccctaccacctcatttccaatctttgcctcagagggcctaacctcgttttacatcatcagaaccagagctctgaatttgaccattgcccartgtttcctcaaagagatgtttaataggcttttgagggctagcctgagaatgtaggcactattaactctcatttctataggaagatatatgtcacattccaattaagtggcttacaaattgagtatgtaacacattcaaatgcatatgacatatatgtaataacctttgaaaatttgtaagttggatatttatagcattaaaatagttaaatttattaaaaataaaaatgtttccattagtgttcctgtctttattagtcaagtaagaggactgaggagctagaaaccttatttgctatccacatttgctatccagcttggagttgctggtaaaagttcctctgtgtgaggaaaaaatgtggtagtttaagcatgaaataaatattgtaagatcacaatgatctattgaatttttaagtacaattataatttaaattcatttttttcctgtatcttgctgctctatgtgaatctccagcagaggataatttaatcttgaagctgaattaagtttcatagtaacccttaccaaagcagataatttctctttacatagagcagaattcaagcaaatttgtattaattttggttgtgaaaagtatctctctgctgttgcaactgtgactgacattattttaatgattctcaaaatcaaacaaatattgaggtttttatgtttttttgtttttttaaatcgaaccccagcttagaattgagagtgtgggttagccatccttcttctgggaagtctaacctagcccattcctattgtattagtctagtctcatgctgctcataaagacatacccaaaactgggtaatttataaagaaaaagaggtttaatggactcacagttccacatggctggggaggcctaacaatcatggcggaaggcgaatgaagagcgaagtcatgtcttacatggcagcaggaaagaaagcttatgtgggggaactcccatttataaaaccatcagatctcataagacttattcactaccacaagaacagcatgggaaagacccgtccccatgattcaattacctcccaccaggtccctcccatgacacatcagaattattacaattcaaagtgagatttggatggggatacagagccaaccatatcacccatcaacccaccagtttaggggccttcctgtttgctccccaggggccctgcactaatgcccatgtctcccatagcacatgtgactgtagctgcttttctgttcatccacatcccccactggactgcaagttcctttcaggagggaaggactgctttggattcactcccttccctgtgcccggcacagtgcctagtcctcaataagtagttaatgaataattgaattggtgaatggctaagttattcccttgtttttctagttgagggatgaaatgtgagttttggataagataggtaacttgcttatgattgtgtaagtagtaaatgacaacacaggcaagataaagtgcctgcccaggagaaagctgagacatagacacagctagtcaccgcagttatcgtagccagggagagcaaaagacagttaaccaatcggaggctaactatagctctaatgagtgacgttatggggtctcataaaagggaaaagagaacaaggaagacactgaattctttctgggttagcagagacacccaagtgtaagaatgtagaaagtgtttgagaaaccacttgactgaaggcaaaaacctcattgttgtgcatatatatacgccaaatggaagaagaaaaattagataaaagtttcaggttagggtgtgtatgtagatatataatatatcatgtatgtatgtaatgtataaaacctgatatgcatatttatggaaatgttctgggtttgatggtggaaaaatcattgaaaacaagtagctggcagtaacagcagacatttactgagtatgtatactgggactgaactacttactgggctgggaggagatacagaaattagagccattctgtcattgatcttaaggagactttagccagagaaggaggatatgaccttaacacaaatgaaaataaagcaaagtgagggaaatataagtaaagtccaaaatatcattattattttgtattatttatttgtgtttgtcttctttcttttcttttcctctttctttctctttctctttctttctttctttgtttctttctctctctctttctttgttctctattttttctctttctttcctttctctctttctctctctctctttttttttttttttttttttttgagaagaagtttcactcttgttgcccaggctggagtgcaatggtttaatcttagctcaccacaacctctgcttcctgggttcaagtgattctcctgcctcagcctcccgagtagctgggattacaggcatgtgccactacgcccagctaatttttgtatttttagtagagacagggtttcaccatgtgcgccaggatggtctcaatctcctgacctcatgatccgcccgtctcaccctccccaagtgctgggattacaggcgtaagccactgtgccaagcctgtatttatttgtttttataagagacagggtctcactctgttgtccccaggctgaactggaactcctgggctcaagcctgattctcttgcttcagtctcccaagtagctggactacaggcacatgccactacaccaggcagtaaggtccaaaataatcaaattwaaaaaaattatagaggcccaaatgtttgagaaactatatgcagttaaaaatatgttaaagatgattcttgaaggataaggcagaatttcaacaggtaaaggtggaatagaggaggcaggtaaggtaaagtcatctttkgagtggttaggatttgtaaataacatagaaacctttaaaagtgacttatacatgttggcattattacctttggtcatggctctggctggaaaccaaggcaggcccaagggtttaacttagggctattgatgaaggtgctctttactgtaggcgtctgggcagagtggacagaatccaaagccttgtaaggcccccagagactggcaacagcagggggttgttgccaccactggggggcctgacccagcagggcagagggtgaagccacagtgggacgggcagggctggaggcaagatattgcttatgagacaagccatcccacctgtcactgtcagccccagtgtgagcttcctatggtccacaagtgcctcatctaccctaacttccttccctttctactttctgatctgctgatgcctccaacagaaactcaacaggaagccagagggccagagagccagcgatggcccatccacagtcacccccaggcacagagaagggtggagaacagatccagggtagctgagaataaccaacacagacacatagcactttctaccaattccagccttatactgaaagttcattacagttttccgcaccagagaattcagcaaaagacagctctgtattggatatcattcagagggattttattactgacagtaccagaaataacttcttttaagtcctactttgtgtgcttctaacgatataacactgttctctaagaaaaacaaaaaacacatagtgatgctaaataagttggttttattagggaaggggatattttattatccaagaccctggcctttcatttcacctgggtgcttttcagagctaggactcagagaacaaagctctgtgaggagactgcagctggagactttttcttactttctaagttcattcttttctctttaggcttgtgggtggtttcctttataagccattttagaagttctgggtctccaytgctcctgaggtgaccagactttctggaaaatggaggctgaggcaggatgatgagctcagctgggtgggccctcatcctgtcctgattcctaagcactgctgggagtaaatcctttaaattgcacatcacatttgcatctctctgtttacatttcttaatttcctcaagaatcgtttgtttgtcgagagctggttgtttctttagcaaagatttcctgaataaacaatgtaaagagccttcttttttaaaaacaccgctccactaaataaacaaatacagcaatgaataaataaaggaaatatctagtaggttaatcctagtccatgcaaacatgttttcttccacacagctgactaaaggcatagattcaatagaattcaagtagttctgactcatgctcatttaatttaatcagcattgaccatatgtttggagtttgtcttaaaacagaagcgtttcttcctagttttgtgtgtgtatgtgtgtgtgtgtgtgtgtgtgtgttcgtgttcaatgaaaactctataagtgttatagactattttcagctaaaaaccttcccctctcctggttagtttcctaatgttgttgcagcaaattatcacaaaccaggtggcttaaaacaaattttttccctcacagttctggaggccagaagtccaaaatcaagggggttagtgggaccatgctccttccatcgaccctggggaagaaccttccttgcctcttcccagcatctggtggctcctggcaatcttgatattccttggcttctggtctcatcactcaggtctcttcctcctgcttcacatggcsttctctctgtgccctccccacttcttattaggatatcagttattggatttagggcatcctaatccaatatgagctcatctggatccttaattaattatatatgcaaaaatccagcttccaaataaggtcactgtactgggttaaaaaaatgtccccaccaaaattcatatcaacccagaacctcagratgtgactttatttgggaatacagtctttgcagatataactagtcaacatgaggtcatcctggattagagtgggtcccaaatccaatgactggtgtctttacaagatcggaagaggccatagggagaagaaagccatgtraagtaggaggaagaaattggagtcagacagctacaaggcatggaacatgaagaattgtcagaaaccaccagaagctaggaggaggcaaggaaggattcttctcaacagccttcagagaaggtgtcccataaacaccttgattttggacgtctagttcccagaactgtgcaagaataaatttctgttgttgtaaaccactaaatttgtgttaatttgttatggcagtcctgagaaaataattcaatcactcttaagttttccaggtagatgtgaattttggtggtatactagtcaatccacttcaccctaactgtgaggggagttggccaatgtcattctacctgttatgcaaatgaggaacaaggtgctaggggaaggggcagagcaggaaactgatttcacttttaaaaaacattattgtggcactattcacaatagcaaagacttggaaccaacccaaatgtccatcaatgatagactggattaagaaaatgtgacacacatacaccatggaatactatgcagccataaaaaagatgaattcatgtcctttgcagggacatagatgaagctggaaaccatcattctcggcaaactatcacaaggacagaaaactaaccaccacatgttctcactcataggtgggaactgaacaataagaacacttagacacagggcggggaacatcacacactgggacctgtcgggggctgggggttgggggagggatagcattaggagaaatacctaatgtaaatgacgagttgatgggtgcaggaaaccaacatggcacatgtataactatgtatcaaacctgcatgttgtgcacatgttccctagaacttaaagtataatamcaaaataaataaataataaaaaacgtattaaagttcaattctcttttttcttggagataaaaagatttctcaaggttcctggaaagccactttttgggggccaatcataaatataatttaacagattatataaatagccctactatttaaaaaaatgtagacccctttagtgcttttatagagctctgagcaaagaattgtaagaaaactccatgccttccctatgatgatctggtcttatttcatgactgctatggtactgcttactagtctactcttggcccttgtccgtgcgctgataaacctttcatggtatgcactcactcatggcttgatggtgtctggatagcagattcccagggttkgttctttaggcgtcaatttttataattatttccttacattttgctctcttttactttgaggaaaggtcgtgtttccttcagagtagctaaggcatggacctagggtaggaggtttcaggaattgctactctgaaggacgatgttttctgtcatcttcctagatttccaacctggggctttcagattccaatttgttagtttgctggaattcttacagaggaaaaggaggttatggttccacatggcaagatcatttgtgtcaacatttaatttaacagtcaatgtttttgttaactgaggtaacagacaatctgcaaacagaataaatttttaaaagattactccatcaaaggggaccttcctcaggaattattttctagaattctctrtctagactggtgatcttctaaatcttctaggcaaaaccacttatgtaatttgcagagcccrgtgtgcacgcagtgaaaatttgggtctccttgttcaaaaaacataaaaaggggaccatggcccttcaagcatgaaagagtgatacctttgttgggcgtgtggtgagaggatcccagggaaagagaaaacaaggagcgactttgaggcactgtgggtggtgaactgcatccagatgatctagcccagcagtctccaactttttggcaccagggacccattttgtggaagacaattttgccacggatggcagggggatggttttaggatgaaactgtcctacctcagatcatcaggcattagaatctcataaggagtgtgcaatctagatccctcatgtgcacaattcacagtagggttcgtgctactatgagaatctaatgcctcagttgatctgacaggagccagagcacaggctgtcttgctcgcttgccagctgctcacctcctgctgtctggttcctaacaggccattgactgctaccagtctgtggccttgggtttgcggacccctgatctagccctttcctctccacctctatcataccgccttcaggtactcttcctcctcctgctcttttgaacgtgcctcacacccctttattttccagcccttttgctccctttctcctcccacattccttcatttgggcagcctgcagcatctttgacctactccaccccacatctctccttcactctgccagttcatatggtcaggcctggattcaacagcccgagctcagaagagcccctgcatgtgatctgatgctctcatgttgccgtcttgaaattcttaatacttttttagttggttttacaaataagtgaagtggtggaatgataaatcagagggttttaaaatttgcaagttaatgctcatgttgcatgaaagaaatacacaggtatttgcacaatgctttgagacactaaaggtctgtgcagccacggcagtatccttccctgtaaaccatggtgatttttwaaaaaaaattattattttttttagaggcagggtcttgctctgtcacccaggctgcagtgcaaacatggtgcttttgattctcatttgacttttgcaggaacatttgtttcactttctaatatcaacgaaatgtttggagttctcagttgtgatagtgaatggcatgcatcattcagtgcatttgctattgtgtcagattttctgtggtgttttagggagtcatccatgaattgatcttaaatgagggctggatatgtatctccctcctcctgagcttccccaactctcctgatttgggtctcatttcctgtcttttatgtagaagctttcataagactctactttgatcattcattgtcttaggaaatttgagttcactaaggagtgtgtaggcattagaacttcattgttcccatctttgagtctgtgtaaccaggagtaattgggagatgtttctgtcatcacttagccctggagcaatttgtactctgacttcaagagagtatgacaaggatagttacatggagagggggatgggtttagaatattttaattgctattctagtacatgtcagtatgacatgatctgcaaaaggaaatttccctaacgattttaagtctgtaccagttgcattttgttcattcagaagagctatgaagcaatgtggattcccattttctcagatagtagattttatataatttttttggcatggagctgtatatggagagaggagctaactggtcagcctgaatatgcctcaagtttatgcaaatttctcaaagcccatggggttcaacaatatcttatgaattgtttctttttctattttacttttttatttccaacttttgattttgattttttttcaaacatgtgggcaagttcaaaagattagtataatgaacacctacacttgccatctagattctacaattgttatagtgagttggttcttgactccaattaggcactttttgcgttttattcacaggcccctttcaaaacctattggttttggcttgtcactcagattttcccaaactgagagggacccattaacttctgtttttatgctaaaaaaaaagaggaaattaaaaaaatcatagaaccttccctattagtgttgttgatgacagtattgattcttgtgtaaattggatttacctttatcctttcatcttcctttttataggctattgagagtttactgtcatgcctacctgagcacaggagtttggcattaaattcatggtttgtaacttaaccattgctacttacagaacaaaacaactggatgaatatcacatggaactatttttcattctttcgagttcacaccgatgtgcttgttgagaaagagaaacatctgaaacacaggccccttggtgtaacatcagtgacaacactgcctgtctagggaacctcgactggatggctgccagctcaggggtgcagttgagaacgattcctgggtcgctgttgactccttggaggagacatttcatgcccacataactctagatatttgctgatggaaagcacagtgctctactgtgcacttcaagtggaatatcatgcagatagcagtgaattgcatcatgcagattagaaggggggttatctaaggtagcataacagcctcttttgaaggcactgaraaaatatatatttgggaatagtgttggcatacagcacctagaacaaagtctcacatgtaaaccatgctcagagaatgttctatttaacttcgtctgtaagatatgaaactgtcttttttctttctcatatttaactttcagttataaagctttctaaattgctttgataatatycaaagatataggcakattaacactttctctgttatttcctctttcatgtgtgttgacacatacaactatatgtgtgtagtgttatataagtgtcaactacttaagtgaagaaagtaggtatggctgtctagaaaaagtgctttaaaagtgggaagacatacttttaaagctaaagcagtgacaagattttgtcatttgaaatagtgggataaactgtagatcataattcataaattctttattcttaaagagtaaaaatattaatgatgaaaatccagggagatttgtttaggctcatggatctattgaaccatttcagtagaaaggagattaattacagttgaaatttcattarcacacattttaataattaaaatatatgaagtgatatgttaagtgaagatgtgatataaatcgtcaaactttatttacgaccttatctaccaaacctcaaattctataaaatttcaaactctataaattggtaggtatataagtacacaaatgcaaaacttgagatttaaaaattcttttctatgcttcacatccccagatttatataggtaatattataatggtaatattcttgactatagcctgacatagcttattataataagattgagttaacaaggtagtgtgtagttacaagaataacttaaatattcttgatgggtttatagattaggagaaaagactttaagagtcatagccttaagagtcaatatggtaagtgaaatgatggctctccacagttgtccacatcctaatccctgaaatctataaatgctgcctgatgtggcagaagggactttgcatgtgtgattgagttaagggtcttgagataggaaggtcatcctggatcatctgggtgggcccaccatcatcgcagggctgcttataagtgagaggcaggagagccagagaccaagagagatttgaagatgccctactgactggctttagaatggaagaaggggccacaagcccaggaaggtgggtggtctccagaagattgaaaaggcaaggaaactgattctctcctagagcctccagaaggaatgctgccctgtagacatcttgattgtagccctgtgagacccattttagacttctgacctccagaactaagagaagaaatttgtgttgttttaagccactaaggtgtggtatttgttaaggcagcaacaggaaactgacatagtcaggaagcaagttggtcacaggtggaactatgtctttgatcaggagagtgaraacctgcttgtgatcatttcctagagtattaaccaaaaagtcttatgaaatgtggaaaaaatagcaatcttgtgacccaggatttactgaagcccttggaattcaacactcagaggtgttaggcaaatccaaagtacttttatcaaaattagtcaccacaattatgttagtagatggaaattaagctggaatttaaatcattctgcacaggataaagctttaacttccatatttcctgaaattaaatattattctaaaaataattacttcctgaattattaatccctgatatttaaggactcactttttatctatggcttgcctgtaaccttgtaataaagtggacctggcccgctttgtgctggggtatgtactagcagaatgctagattgaattgctagaaaaaagccagccaacagtttggctggaagaccagtcatctgcagagcacaccagagctgacagccatggggcacctcctttctggagtctgcacaagtgtgaaaaaggctactttatgctaaaggagcccttttcctggaatatttacttaggcctccatctccccatgatgatttacatgttatttctcacccctgctgtcaggataaaatgagtattttgaggtctcatgatctgaagagtgttggtactacctgtcacctgtcaggaagatggataccagcatctgctgtagttgttgacttgtatcaaaataaccacacagtacttgggtacagtgaattctgctccttctttgtttccttggctrgtgcttaagataaaaaaagtacattattctttgtatttttctagtagcattcacttggatctttcaaagcaaaacctgcaaatgtttttactttcatgaagctagtaagtataggaattgttgtcttcttaatagtatagtgcttacatatgtgggctctggagccagactgcgtgggtttgaatcctggctctgccatttactggctgtgtgaccttgggcaagttcctttacccctccctgtggctgtttcctcaaaaggggcataatgatattttctatctcataagattgtttgagggtgagatgaattaatatgtgaaaaacacctagagtagtacgtagcacattttagtaaaataatgactatgtatttacttgaattatttaattmttataacctccatataatgagttacgggtgatttttattccattttagagatagaaaccatggcatggataactggtccaattctcatggttggtaagtaacaacaccaagataagaacttgtgtctgtgtaactccagggtgaaactcttaattgtcaatctatactgcctcatatacttctttatttccatacaattacccatgatatgggaggcacataatgtttgagtggtgattctgattgatggattaagagggattctaaggctatgttttattaatgatatcagccataaatgcttgagttgtgaargtgaatgttctgtatattttgctgcacacagtaaaatgcctttacctgagtgtttgtcatctagtcctataaacaagtgtggcatcatttggagaccaacacatatatttcaagaggaattttgagaatgagatttttatgatgaggaaatataccaaacctttccgaatgtgatgaaactatgaaatgaaaataaagtggttccaaaagtctgagaccattggctccccccacctccagaaacccgcagatggatgatgtgaacatgtcctggtcctcttttaaggcataggatctccttaatctcttccagaaatttctgttgaaaagtggagttccaagacagttccaacatccctggcatcaggttaatggttaaaaaacacgccagagtcctgggttccagtgctgcatctacaggttgctgtgaaggtcttggcaagagaatctgcttccttccactccacctgaaaacctgtaggtcaatccttcagctccatgtttaggcttcttactctgtctgattctctggcaaagctgggctgccttcactaatttctgagttagaagacccacttctgagtaacctggcctacttagcaagcacacatttctcccatcctgacccagctttctgaaaagaccaatttggtctgccttaatgtctgcttaatgctttctaatttgacactgattttctaaacatctgtactcaatttaagagtcttctaaaatgtacatcctctaaacacccatcagttaacattataattttgtgagactcagttgacagaattgagtacccctttgccaaggttttatctgtaggagatctgaattggagagactacttcctcaccaggttatccctgtagtctgccgaaatctatgttgaaaatatctggtcagatacctttttcagaagaggtagtagtgggtgggggtgcagtgtatgaactttggagttggacagcctggatttgaaccctggctctgcgaatgatcagcttggtagcctcaagtaatttatttcacttatttatatcttagcgtcttcatcttaaagtgaggatgattgtagttctacctcattgagttctagggagaatttaaagagaaaaacacaagaaaagatttagcccaaggactggcccatagtaagcaggcaatttggatacttttrttataagtcagtggtggcttttttcactattctaactttgttattctaaccttatgttaaatggatttatactgggcttaytcattaatttatttaatagttgttgagcaactactgtttgtaactcactgggtggttgataaagataagatccttgttctaaaggagcacatgttttagtgtacaaacaagatgaacacacaagtaaataaaatcaggttgtactaagtgttatgatagtagtgattagtgtagcatgatacaaagtaatttgggtcaggtagaatttttacagttgatggagaaggggcaatcaaggtggtgacatggggtggaggtgagggatacattctaggcagaactatagtaaattcaaaggtgctgagatggaaaagagcttggtattttctagctatataaagaagcctaatgtattgtcttagtctgttttctattgctataacagaattacacagaatgggtaatctataaagaaaagaagtttatttagctcacrattctggaggctgggaagtccaaggccatgacactggcatctggcgaggaccttcttgctgcatcatcatatgttggagggcatcaaatgctgagagggcatgtcagctcaggtctctcttcctcttcttagtcccttcatggggactccaccctaatgactttacccaatcctaattacctcccaaaggccccacctccaaatgccatcaacatatgaatttgaggattgttccaacatatgaagtttgtgagacagatttaaactatagcagatatstagagtaataattcttaaatttagtgtttctgaatcattgaaaggcttgttaaaacacagcttgttgagccttaaacccagactctctgwttcagtaggtctgggatgggtcctgaaagtctgcatttctaaaaaggtcctaggtaatgatgcttctggtcctgggaccaccctttgagaaccactggcttgagcatatgaattggtcagtggcagataatgaggataaaggggcagacaagggccagggtgtaagcatcatggggtccatggcgtttgctttttattctaagtacaatgggaaacctttgaaacatgttgatttggcacatgatataattcgatatatgttttaaagggctcactctgattgctgtggggagactgggtataaagctgctggaattgtccatatgagagactagtggtgtagaccagagtggtggcagtgggctgcacagattcagcatgcattttggaggtaggctttccaatgtttgttgatagttttgatatagcaagaggaaaaagtactagttaatgatgacttaactcatgtcacctatttaatagaaaccatatatcagttaagagatgttcatcttagattgttttggaactagtcattctttcacatacttatgaatttaattatccctgaccctgagtcttttgttaactttctgaaattaagaacacaataacagtcctcttatgctttgtaacatgcatttcacctgaagatcacaagtttcctcttctagactggttcttttatcctttcatatatcatttgttcaacaaatgtttgaatagttgttgaatgaatacatttcttcttacccacattggattgcaaacagagattccataattcttcatctattatggaagcatgccgttatatattattcagttacccagattgtatgttaatttgttatgtrctaacatgttgattttccttctaagaaaactgtctatagttgatatatattttccaaccttcttaaacagtgttctaagcagagtttagtattttcttgatggctcatggcctgataataaacatcatttattggaacatcagtattgtgatttgaaaagagacaaagataccatgggatagactgaatgcacatcaacctgagttgtgatrctttttgattggtcacttttcggttaaatgtggaggagagtgtaaatcagtgatgtggttcttagcctgtctggtattcagtaatatcaattatcgaaccaacaacctaagtaaggaagtgaaagtgaaatcatatctaagtggcacaactttacgtggctaatcttgaagattctttgcaaaagtctgtaaggtagttatacctccactttacagatgaggaaattatgtgctcactgttgrggcgacttgtatagtcatatatatagtaagtggtggagcaggctttaaattctctgtcggtttctctgactaaaacttacattctttttcatatatatatatataaaattagatatgttttaaagggttcactctgactgctgtaaggagactggttataaagctgctagaattgtccatgtgagagactccctcagtgttactcccatccttggtgtgtcaccttcttgttagtctcaatacactcttgcttattatctttataggtctgagaggaagggattggtgctacacggacattttgatagaattgcagatgcttttgtcacctgtaaggaaaaagtatttatagacattgaatgactragtactctggaggaacacaaaaagaaatggccaattctacccagaaagtcagaaaagcatcctagaatatagtagtcaggttgagctgtgtcttgaaccccccatttggtgttggtcaggaagctgtggggaggaagacttctaggcagaaggcagagagaacagggtgagaggcataggactgtagtatgcagccactttagattttctgaaaactgctggttgctcagtaaatagaatataggtggagtggtggatcagagggctgggggaacacaggtggcaaaaaaagacaagaagtgagttaagcaagggctgtatcataaaggattttgtatgttttcatgaactcggcctttgttcagaaggcaatggggagaacctgcaggatatttttccaaatagttttattgagctgtactgtacacattataaaattaatctgtgagaactgtatacctctgtatttttaaaattaatttacagagttgtacaaccatcaccacagcagttttcgaaaatttccatcatcccccagagttctctgatttccatttgcagtcaattcccacactacaggttttttaaggccttagttttacattttattcaagaaccctaggagtgaggtgaagagacttaagggacataggccagaggcttggctagccctccctccctccctgccttttatccattaaggttatatgtgttcaacactcagtttgtaccagtatgtcccagtggctccctccagtctcagggtaaacgtcattcaaagacagtgccatcatttcagtgggtgttgttagtacagtttagtgtgtcaaaacacttcagctttctcttagttcacaggaaaccacatttctgcaaatggtcccatattagaacaaaaagataatattgacctgccagttctaaaagggataattttattttgaaacctgtgccatgttaaaatttgacaaagatttttgttgtgtgcctgtatcatgtagctaatttttttgtattttgcttttaatcaataggataatgaaaagacctgctttctgtatttgagagtttatctgtcctgataaaaatcatttaggatgttggtytgtggagaaaatgacatcagcattgatatttaataaaagtagtaagccaaggagactaactgcttaacttcaactttaaaaaaacaatcacagatgtcttttactatatgattctggcagaaaaaaacattgcccacaccaagtacaactttagtataagcttaattctgaacaatgagagttactaatatccaagcctacaggagccatactgtccagctctaatacattttaaagaaaatcttaataaaacaaaaataaacaaaaacatctggaactaaatcctggattattccttgtctctttatctagtttataaggaccttgtcaattttggttgttgattctatactactaaactatatgtacatgattccatactactatactagaccacttccaggcatcatagtcaagaatgtagaccccgtaaccagagtgtctgagtttgaattctgggttctgtcacttactagctgtgtgaccttgggcaagttatttagcctttctgggtctcagtttgttatttagcctctctgggtctctgtccaactgtaaaataagaataataataactacttcataggaattttttaagaatttaatattaatatttgtcaaagggcttgtatctaacacattataaacattatattgtgttacaattctatccatttgtatatcagcttgtcagagctgttgttatgcaaagttttctcagtgaaaaataacatcaaactttgactttttcccatatgaattccattcttatttttgtcttcagttttcagaattttacttatgatgtgttttagtgtggctttctttgggtttatcttacttggtattctcgtagcttcttaaatctgcaggtttgttttttagcaaatatgggaagtttttagttatttttatgaatatgttttcagctctactctttcttttctccatctaagattccaatgatatgactgttgagtcttttgtttctgccccacaggtgtctctttctattgttctatcttcaagttcacttattttttttcctctgtcacatgtatttgcctattgagcccttctagtgaatttttttatttatttcagttattgaagttttaagtctcataatttccatttggttcttctttatatctagtaccactgggtagaggatgagagatgccaagcctgcaggagcagaaactattttctctggcttgggctgcccattgctgatggggttgtcactcagttcctgcttgtgctacctgtgagggtgaaaagtgcttctatgggttggcctggcatcaccaaatttggaggcagaagatgccaggctcatggggggcagagagtgcttcctcgggctgcctggtgctggctgtgcttctgcttagtctttcctggtgcctcctacaggggaagaagcacctacctgggacatcttctgcctccggatgggtggttaggagattttaggttgctgtgctgctccttgacttttgaggtccccagccagtctgtgttcttctttcacctttcagaatgttcttatgattgtttgttgtgttatatccagggtttggggtcatacttagcagggaaaagagtctatgccgtcttgtccaaaactagagaagctcattactttttctaaaatattctggaaccgagccctcagaattgtagctgcacttctgcacatgacaatgacaataagaattacctcaaattttacattttggctcttgcttagagactttctctaagattctatgaagagttttgatcttctgttttctcaggataaagtcaggttgacatttctcagagagaaagtgggactgtagttggtgctacttgcaggatagggtttgcaacctgtgtaattggggtgcggcctttggaatgagatattgaacattttagatatcatctgaataaatcaccaaatgtatttctcagcaattgcaaactatattttaacaatgttctattcccttttaagaatggttatttaataatacgtggttgtatactaccagtacagtttaaattatcattggcaaataagtgatttgtaaagcattggccatagaccatagaggttgctgggtccttcatttacgagtgtatgatttttgagtttggatatcagccagggttaggcaagaagcagactccaattcagatggtccaagagattttgatgaaaggactgcttacaaatatgggagcaggtaacacaattaccaaagggtgttggacacccaagactagttacagtgggcggttattaccatccttagtcctggaggtgcaaggagaggaattagcactacaggaaaccagtgggtaaaggagctatgagagagggatctcctgttggaagctggagacacggagggacagtcactgtcagaaaacataccttggaggaagaagggagtggggaagaaatacctcagctcctctcctcctgagctctgatctcttgttgttagtgcttcccaatgactgggttcacccagaagcctgcctatgaggaagctctggcaatgcctctttaggaggaagcctcaggtcatacagcagggcagggcaggtggcaggatgacccacagtgggtgtagatgcagactgaagaatcagtgtaggccgtaatagtgagggctgtcatctgttggattcttgctacaagccaagcactaagcgctttatatgcatcatccctagcgtgatcgtcagagactcccatcatttgattgatgaggaaactgagctgcagcatgactaaataactcactcaagatcacatggctagcaagcagcaaagctggtggtattggaactgtagctttcagttcccaggtctgtgtatatacccctaagcctcagttttcaagttataaaataagggtaatatacctaccacagaaggtcactgtaagggagaccctgcaaagtgttgagctcagtgcaatacatgtaggaaatgttcaacagtgatacatttcctctgattctgctttctgtcatctttctctatttttattttttatgtattgaaacagagttttgctcttgttgcccagggctggagtgcagtagcgcgatcttggctcactgcaacctctgcttcccaggttcaagcgattctcctacctcagcccctggagtagctgggattacaggcatgtgctaccacacctggctaattttgtatttttagtagagacagggtttcatcatgttggtcaggctggtctcaaactcctgacttcaggtgatcctcccacctcagcttcccaaagtgctgggattacaggcatgagccaccacacccaacactctttctgtcatctctctcttttgcagatcaacatggaaaacaaacattatgctacacagctcatgtgactgggatattttcctccttagcagagagggaatgctttaaacagtctttcccccatgttcttcaaggattataattgaggcatcagtttgatctacatgttgagggaagtgactaaatagaaattcaatgcagggagccaagatacttaataagtgtcagtgaaaatagttttacaagttgtttactcaacaatcacagttttcatttctaaggaaaggtgaaactacaataaattcttaaccaaagaaaggagatttctatctagaacaattgaatacttctaaaggaagaaggctgcccatgcgttttttggctttcccatatcttagaaacacatgctattgaaactttgagaagccatttcacaggtgtgttgtcacttttcctccctccgcccgagacttttctgtattgttggttgttttcactatttgagaagttaaagtattagaatttagtagatattggggctcgrcataaagatatcmttctggtttcatattaaagcatctgtgtttatattggcttcttatctgcaaactgtccactgactcaatgatatgtcagctcgtttgttttggtgggatatttttccaccacttccattctctagacacttttttcttttttaaaaaaattttattattattatactttgagttttagggtacatgtgcacaacgtgcaggtttgttacatatgtatacctgtgccatgttggtgtgctgcacccattaacttgtcatttagcattaggtatatctcctaatgctatccctccccactcccccaaccccacaacagtccccagaatctgatgttccccttcctgtgtccatgagttctcattgttcaattcccacctatgagtgagaacatgcggtgtttggttttttgtccttgcgatagtttgctgagaatgatggtttccagcttcatcgatgtccctacaaaggacatgaactcatcatttcttatggctgcatagtattccatggtgtatatgtgccacattttcttaatccagtctatcattgatgggcatttgggttggttccaagtctttgctattgagaacagcactgcaataaacatatgtgtgcatgtgtctttatagcagcatgatttataatcctttgggtatataaccagtaatgggatggctgggtcaaatggtatttctagttccagatccctgaggaatcrccacactgacttccacaatggttgaactagtttacagtcctcccaacagtgtaaaaatgttcctatttctccacatcctctccagcacctgttgtttcctgactttttaatgatcaccattctaactggtgtgwgatggtatctcgttgtggttttgatttgcatttctctgatggccagtgatgatgagcattttttcatgtgttttttggccacataaatgtcttcttttgagaagtgtctgttcatatccttcacccattttttgatagggttgtttgtttttttcttgtaaatttgtttgagttcattgtagattctggayattagccctttgtcagatgagtaggttgcaaacattttctcccattctgtaggttgcctgttcactctgatggtagtttattttgctgtgcagaagcacagcaaagctctttagtataatcagatcccatttgtcaactttggcttttgttgccattgcttttggtgttttagacctggaatccttgcccatgcctatgtcctgaatggtattgcctaggttttcttctaaggtttttatggttttaggtctatcatttaagtctttaatccatcttgaattaatttttgtataaggtgtaaggaagggatccagtttcagctttctacatatggctggccagttttcccagaatgatttattaaatagggaatcctttccccattgcttgtttttgtcaggtttgtcaaagatcagatagttgtagataagcagcattatttctgagggctctgttctgttccatttgtctatatctctgttttggtaccataccatgctgtttcagtaccagtaccatgctgttttggttactgtagccttgtagtatagtttgaagtcaggtagcatgatgcctccagctttgttcttttggcttaggattgacctggcgatgcgggctcttttttggttccatatgaactttaaagtagttttttccaattctgtgaagaaagtcattggtagcttgatggggatggcattgaatctataaattaccttgggcagtatggccattttcatgatactgattcttcctacccatgagcatggaatgttcttccatttgtttgtatcctcttttatttcattgagcagtggtttgtagttctccttgaagaggtccttcacatcccttgtaagttggattcctaggtattttattctctttgaagcagttgtgaatgggagttcactcatgatttggctctctgtttgtctgttattggtgtgtaagaatgcttgtgatttttgcacattgattttgtatcctgagacttagctgaagttgcttattagcttaaggagattttgggctgagacgatggggttttctagatatacagtcatgtcatctgcaaacagggacaatttgacttcctcttttcctaattgaatgccctttatttccttctcctgcctgattgccctggccagaacttccaacactatgttgaataggagtggtgagagagggcatccctgtcttgtgccagttttcaaagggaatgcttccagtctttgtccattcagtatgatattggctgtgggtttgtcatagacagctcttattattttgagatacgtgccatcaatacctaatttatggagagtttttagcatgaagcattgttgaattttgtcaaaagccttttctgcatctattgagataataatgtggtttttgtctttggttctatttatatgctggattacgtttattgatttgcgtatgttgaaccagccttgcatcccagggatgaagcccacttgatcatggtggataagctttttgatgtgctgctggatttggtttgccagtgttttattgaggaattttcatcaatgttcatcaaggatattggtctaaaattctcttgtttgttgtgtctctgccaggctttggtatcaggatgatgctggcctcataaaaagagttagggaggattccctctttatttattgattggaatagttttagaaggaatggtaccagttcctccttgtacctctggtagaatttggctgtgaatccatctggtcctggactttctttggttggtgagctattaattattgcctcaatttcagctcctgttattgatctattcagagattcaacttcttcctggtttagtcttgggagagtgtatgtgtcaaggaatttatccatttcttctagattttctagtttatttgtgtagaggtgtttatggtattctctgatagtagtttgtatttctgtgggattggtggtgatatcccctttatcactttttattgcgtctgtttgattcttctctcttttcttctttattagtcttgctagcggtctatcaattttgttgatcgtttcaaaaaagcagctcctggattcattgattttttgaagggttttttgtgtctctatttccttcagttctgctctgatcttagttaattcttgccttctgctagcttttgaatatgtttgctcttgcttctctagttcttttaattttgatgttagggtgtcaattttggatctttcctgctttctcttgtgggcatttagtgctataaatttccctctacacactgctttgaatgtgtcccagagattctggtatgttgtgtctttgttctcattggtttcaaagaacatctttatttctgccttcatttcattatgtacccagtagtcattcaggagcaggttgttcagtttccatgtagttgagtggttttgagtgtgtttcttaatcctgagttctagtttgattgcactgtggtctgagagacagtctgttataatttctgttctttcacatttgctgaggagtgctttacttccaactatgtggtcaattttggaataggtgtgttgtgatgctgaaaagaatgtatactctgttgatttggggtagagagttctgtagatgtctattaggtctgcttggtgcagagctgagttcaattcctgggtatccttgttaatgttctgtctcattgatctgtctaatgttgacagtggggtgttaaagtctcccattattattgtgtgggagtctaagtctctttgtaggtcactaaggacttgctttatgaatctgggtgctcctgtgtygggtgcatatatatttaggatagttagttcttcttgttgaattgatccctttaccattatgtaatggccttctttgtctcttttgatctttgttggtttaaagtctgttttatctgagactaggattgcaacccttgcctttttttgttttccatttgcttggtagatcttcctccatccstttattttgagcctatgtgtgtctctgcacgtgagatgggtttcctgaatacagcacactgatgggtcttgactctttatccagtttgccagtctgtgccttttaattggaatatttagcccatttacatttaaggttagtattcttacgtgtgaatttgatcctgtcattatgatgttagctggtcattttgctcgttagttgatgcagtttcttcctagccttgatgatctttacaatttggcatgtttttgcagtggctggtactggtcgttcctttccatgtttagtgcttccttcaggagctcttttagggcaggcctggtggtgacmaaatctctcagcatttgcttgtctgtaaagtattttatttctccttcacttatgaagcttastttggctggatatgaaattctgggttggaaattattttctttaagaatgttgcatatttgcccccactctcttctggcttgtagagtttatgccaagagatcagctgttagtctgatgggcttccctttgtgggtaacccgacctttctctctggctgcccttaacattttttctttcatttcatctttggtgaatctgacaattatgtgtcttggarttgctcttctcgaggagtatctttgtggccttctctgtatttcctgaatttggatgttggcctgccttgctagattggggaagttctcctggataatatcctgcagagtgtttcctaacttggttccattctcccagtcactttcaggtacaccaatcagatgtagatttggtcttttcacatagtcccatatttcttggaggctttgtttgtttctttttgttcttttttctctaaacttctcttctcactacatttcattcatttcgtcttccatcgctgataccctttcttccagttgatcgcatcggctactgaggcttgtgcrttcgtcacatagttctcgtgccatagttttcagctccatcaggtcctttaaggacttctctkcattggttattctagttagccattcatctaattttttttcaaggtttttaacttctttgcyattggttcgaacttcctcctttagctcggagtagtttgwtcttctgaagccttcttctctcaactcgtcaaagtcattctccrtccagcattgttccgttgctggtgaggagctgcgttcctttggaggaggagaggcactctgatttttagagtttccagtttttctgctctgtttttttccccatctttgtggttttatctacctttggtctttgatgatggtgatgtacagatgggtttttggtgtggatgtcctttctgtttgttagttttccttctaacagtcaggaccctcagctgtaggtctgttggagtttgccggaggtccactccagaccctgtttgcctgggtatcagcagcggtggctgcggaacagcatatattggtgaactgtaaatgctgctgcctgatcgttcctctagaagttttgtctcagaggagtacctggccgtttgaggtgtcagtccacccctattggggggttgcctcccagttaggctactcgggggtcagggacccacttgaggaggcagtctgcccgttctcagatctccagctgcgtgctgggagaaccactactctcttcaaagctgacagacagggacattcaagtctgcagaggttacttctgccttttgtttgtctgtgccctgccctcaaaggtggagcctacagaggcaggcaggcctccttgagctgtggtggtctccacccagtttgagcttcccagctgctttgtttacctactcaagcctcagcaatggcaggcgcccctcccccagcctcactgctgccttgcagtttgatctcagattgctgtgctagcagtgagygaggctccgtgggcataggaccctccragccaggtgyggggtataatctcctggtgtgccgtttgttaagcccattggaaaagcgcagtattagggtgggagtgaccccattttccaggtgccatctgtcatccctttctttgactaggaaagggaattccttgaccacttgcacttcccgggtgaggtgatgctttgccgtgctttggctcacgcacggtgcgctgcacccactgtcttgccccactttctggcactccccagtgagatgaacccgctacctcagttggaaatgcagaaatcacccgtcttctttatcgctcacactgggagctgtagatagctcccagctgttcctatttggccaccttgcctccaccccacttttttcttaacacctaacacagataaagtcatgcttcatgatttagtatttactaactccataagtgctaacagattttcatacattgactcccagcctcccaaccattttgtaaaactctttcaggtcaaggtcagtggttataaaattctttcataaccctctctagcctaattcaatgccagactgagttaataagtaggtgctgattgatgtttactgcactctgtgtttatttctgtctcttgcaaggaaaccaattcaaattcacttctagttgttcctccctctaccctcaacttttaatccttataagaaaatcttttttggttttcttctaaaatgtaacagattgctctcaaaaattacaggaaattcagaataaatatacaagcaataatatgattgggagaaaaagaataccagtcataattgcatcacaaatatagttctaagagtaactcagcaagatatggacagaagttatatgaagaacattgtagtcctttactgtgggacataaagactgaataaactgggaaatagtccatgcttctgagtgggaagacttcattttttaagatgaaaatcatttcatccctaaataaatgtttaagtatataaacaaacaagcagatatttgctgagcaaaataatctagtgtttcagcataacgtttggtgttaaacatcgtacaatgaatttcccaccttttttttaaataagacttactgtgaggattgaataagataatatatgtaaaatacttagtagagtgcctggcatatgataattggtcaataaatataggcagttcttttatttttattaatgatgtttatgttgaccatctggcttttaaaaaaatgtgtattttctaatttttctaaagcattgcttttgtattaagaagttaacaaaaattgcttttaattagaaggaaaagggagaaaccaaaggcaccataaacaagatatattttttaaaggggctaaacttaatgagggagttgacctggtcacaggctaggtagacgtgtcttttcagaagccttttgatgtgttcatgtcctgcttgtagcttgtcttggttctcgtattgttcctgcttacttctcatgtagcaagccctcacccatttgtgtaggtcttgactggaaaaaagatggaggggccttagatgtcaaactctaatgtgcaggagtggaattatttggctaagacctatctcaggggatctgataccttcatgctactttggtgatgttctgtgtccatttcatttctgttagccatcttcccttctatgacttactgaaaataaccatgtcctctcctgctttctcctgctgaagccttctctagattttcaggccagagcactttaaggctacacagttttagttccaattctatgcttcttctatcctttctctgacccctcctgcccagtccttccatttttctaggcctgtagggatagcagttgaagcagaaatgactcacttctctttgactggaaagtgtgggccataagcatgttcattgcagactctgttttctgtcctgatggtctgacatataccaaactggtttttaactgttgcaagtagcactaaaggactcacttttctgtgcagactccagggctggcactgaacagtcatagtgaacttgttttggaagatgttagcacttaggtgcttctaaggtaaagaggtcttaacagtagcaatactttgaaatgctctctgggtttctctcattggtactggtttgctttcagaaagaggcccaagagatcagtgggaacaaagtatttcttcatttttgtactattggagaaaagatactggaagtttcttgaayatttagaagccagagttttatttttagttatgaaactctggacattatagayagataacagtataccatcagttttcttttgccatttactctagattttacagagatcactagctataagttttgtcttgaggctggaaatttgaactctctggcttaaggatcatctcagcaatctgagtcaggatttatttttgctaataacaactttcctctgttcaatccattaactcctctcattgataaggacataaagaaaatggtttctggagatatttttattggtgttggtttttgccttagtttgggtgaaatgatatgtgtttatatatttatgtatgtatgttcatgtaacacaatgtatagtatggaatgttatacatacgtatgtatgtttgtagacatctaagtgtgtgggggaaggggaaaattctagcagatcccagcatgatccagtatggaactatagacaggcaactgggcaggctaatttctcagtctaatcaacccgtctccttacctgtgtctcatgttgccccagtgttcttatctgtcaaatgggatcatttcctcttttcctcagaggaacagagtaggaataaatgagagagtgtatctcacacactctgatactacatataaaataaatatgaaatatgcatttagactcacttcattccttttaaagagaaatttcaattatactttatatattttaccagatatattcagaataactttatcaatatactctgaactcaatcttgtatatgtatatatgtgtgtaaatatatgtgtgcatactgtatataatgtataatagcctgtgtgtgtrtatatatatatatatatacatatacatatacatgtacgagtgatttaatagtagatacattttgtttgttttctactggaagatttttcttttttctccatatgctgacaatataaactaagctagattaattgtagctcattcatctttaaacttaattaattcattgcttctccaggcaaagcagttcatgcttatcaaacagaaagtgacactttctttactatttctttagagggtggcagacagaacgtgtcaatttgttaggccaaattgagagaggagatgatgaaattgaacacacagatcttgctgctgggaaatgcatgaacaggaggcactcaggagagtagaaactgcatgactgacaaagatcctggagagaataagagaaacaatccagaatttgcatcattttgactgatacacctgttagattttggaaaattatgtagtcactcccatatcttattagacatttagattttatttattttacttactttttattttgaaatcattgcaaactcatgaagaattgcaagagtagaaaaaagaactcctatacactcttcacccagatttattaatcgttcatattttaccagttttgcttcatcattatctattttttcctgaaccatttgagataagcagtactctcttactcttaaatatttcaatatgcatttcttaacataatcactgtacaatgataaaatactgttatctactttacagtttgtattaaaattccaccacttgtctttatacacagtatcctcccttctccttttcacctttctttgctttcatgaccttggtaatttgaagggtcaagactagttattttgtagaatatccctcaactttggtttgtcagaaattgcctcatgattaaattcagactctgcatctttggcaggaacatcacagaaatgatgttgtgtctttctctgtctaacacacagggaggcacaggatgtcagttgtcccgttgttgggcttttcactttgatcactgggttaaaatagtgcgcttcagttttcttcattgtaaagtcacaattttaattttagcaagttgaggccgggcgcggtggctcacacctgtcatcccagcactttgggaggtcaaggtgggtggatcacctgaggtcaaggattcaagaccaggctggccaacatggcaaagatggggtttgtctctactaacaatacaaaaaaaaaatagctgtgcgtgatggtgggcgcttgtaatcccagctatataggaggctgaggcaggagcattgcttgaacccgggaggcagaggttgcagtgagccaagatcatgccattgcactccagcctgggtgacagagtgagactctgtctcaaaaaaaaaaaattagcaagtcgaaaattacattgtttctagtgcattctacatattgataatttaaaatggaacttttacatcattccttaaagtgtatgcaatggaatattttatttgatttggcacctattctcctccttaagaagcataatagggacagagttctttaaacaattggaaactttattttcattctagtctatgtttgaaaatctcttattgatcaccctatcatgatatcctcaaacaatatgaatattaatcaaactctatcaatttcctgtcaccatagtcttagtattaatttcttttcttctggattggattatctttataattattgttagcatccaattgaccaaaattaggactgatgcagtggctcacgcctgtaattccagcactttgggagcccgaagagggtggatcacttgaggccaggagtttaagaccagcctggccatcatagtgaagccttttctctactaaaaactacaaaaattagctgggcgtagttgtgcacacttataatcctagctacttggtgggggctgaggcaggagaatcacttgaacctgagaggcagaggctgcagtgagccgagattgagccactgcattccagcctgggcaacagagtgagactgtgtctcaaaaaacaaacaaacaaacaaacaaacaacaaaacaaaaaacaaaaaacaaattgaccaaaattatgtgaatgaattatatttttttgtaaacaattattacatataaatcataaaactagcaatacatctcataataaaatggagggagatgatgattatggctctttgattaggctttggggactcttattttctgttggttttcattcatcactcctgagatttttgtactggggaaaggggtgataggaagaagtgtcaggaagcctcagctctagaaagtagaaagctgtagaaagttctgagaaaatctacgtatagaagtcaaggtctggaaatgtattccttacaattatctgtatagtatacacttcagagtatcctttcagagctccaggatatgagggggatccaggggaagatttctttgctgattaaccaatccagagacttctctagaattccaaaattccttggaaagtcatctaatatgcctaaatcattccaaagtaataaatgtgtatatagcacctagttttttgaattgtgtctgggtgcactatgatatataataaattattttgcagatttcctgaaactgcagcaagatcattaaaccagaacatttattgaatgactactgttcgacaggcactgtggtaggcagtttttagatatgcttgatatgtgaagattggaaattacaagacagataaatcaaggctggatattcagattgcaaaaggcarctttgcaaaagaattagtcatagagtgtctgtaaatagagtactctcaactgcaatttgaattgctcaatttacaaaaataatcagtttacagagagttgcttaggaatattttgaccacataatgtcagatgcacctctgtgcttgaagcaagtgtttataaaggcagaaacatgtctaaatatgattgtaatctttaaagaagaccattatgggtgttggttggaggctcattagggtcaattgacgagccctggaaaacggcacatgcttggaagcggaaactgaggtcaaacctttctgtctgtgtcacttaacttggcactagcatgaatgaaaggtaatttactctgcagatgtttggatgaaaaaacattttttatgtaatgttagctgtaaaataatttttaagccagaagaagcatttcatttaatcacttcagtatatttaaggtttagaactcctagcgagtggaaaaccaactgctcactggtacattcaacattccatatgtgtcatactggagatttgtggctggaaactgtgttttgaataaaacccagttgattttcagggtcatttagcctttggatggtaacttgttaaaaaatataaagcaaatcagatcctggttgctacttagtggcttcacaacagatgatattttctacctgcttgtcttttaacaccctcccgaccccattccacccagcaataccaacgccacatctggaaagaaattgctgagaaaatgcatttctgctaagctactcaggaagagaacaccagtgtatgcaatgctgcacaaaaactgtgctaatatggcccagtgtttcccatttttaaaaaatgacactgttgatatataaaaaaaagaaagaattatcttgttatatcctacagagaagcaaactaagtttgccagtgatgacacagttttcaaatgctgagtcacttcctattgtcccttgctgtgtattttgactgtaagaacccaaggcatcagtgagggtgaggaggtttgttccatcctctacaggtgatagataatccagactctactggggtctcatctgcagctgttttcaaggactacatggaaactgttgaatgagggaattgggtgatgccagggttacagcgaaagggtttatatttgtgcctgatagctacaagctggctaatgcccacagtaggaggaaccagtggaaaactgatgcattattcttatgcttgaaatgtcaacgtggggttgcataaaccttctttacatttatatcagtttaattgacttggctatctagtatgaaatgtaagactggaggaaatcatatgtatttttaaatttctgtttgaataccacagtggttttaatacagagcaattatttttacctctttaaaaagagtaattaatgaattttcctatttttattgctcattgtcagtcaatttcacccctggtgtttgcatatgtttagattatagtctttttgtagagaaatgaggcagccttattaggaagaatatttatatactcaagatgaaaaatctcttctgcatacggaagcatcccaatttataaacaggtagctgagacctgtacaaatataaattggtcctcctgtttctctgcccatgattttaaccaatttgtgttcaattctatgtctatgaatactttgaaagacttacagttgtggtaaaagttaggaattttagtttgtgttgagtattttatttttggaaaacaagtgagctagattttaatttgagtttttgctgattgactcattctggttttttttttgtttttgttgttgcccttggtggctgcaggagacatggataatttcaggctgtcctgaaatttgcttctgtgtaacctatctaaagaaggcttttttcttactgtgaacagggctcgtctgcctgtttgcttaggaatgcttccagatatatctgagttgtagcattaaaaaaaaaaacaaaacgaacaataatgatcaaagaaatagatgagtcagaaggagcttgccccactgttacagactgtctgcctggatgccataaagggagaaaaaggggctgggtgcagtggctcacacctgtaatcccagcactttgggaggccctggcaggcagatcacgaggtcaagagatcaagaccatcctggccaacatggtgaaaccccatctctactaaaaatacgaaaattagctgggcgtggtggtgcacgcctgtagtcccagctacttgggaggctgaggcaggagaatcacttgaacctgggaggcggaagttgcagtgagccgagatcgcaccactgcactccagcctgggcgactctgtctcaaaaaaaaaagcggggagaaaaagtagacccttgctgaggccacatgaagtgccaggacagaagctctgctggtcctcaccatcgccctttgactcaggtgctgttgttaatcccattttacttgtgaggacatggaacttcagagagggtcaccgaaaacctccaggtcattcagctcaaatcagagcttcatgtccctaacactcttaagcataagctgtgttgcctctgaaggaagacagtgcagacagaagagaagagcagcttagacagtgaactttggataccagagtgacgtagcactggcaggcgggactcttgtgggagccacatggtaaatcagtatattccttcagtgacctgagcaaatcatttaatttcccggaccctcaatttttttacgtttcaaatgagatagttgggtaggatgctatctggacctggcaatattctctaggtacttccatgagttaaatgttcaacctggagtgctgcaactagttactaggagttggaatttttaaattttaagacaattaatcagtatactttatactgccccaccccattttgggcacaaggaaattcctattattgaacctactctctggaaattgcctcctgaagactaaactttttaagttctttataagattagctcatatttaactgatggtttcagcattttgttttgatttgagggtaactttaccaatgaaggtaaaaccttaaccttatttccctatctgccagaataaggcagaggaaaacacactttgggtatatatgggcatcctgcttcagtgggaaggatttaatgaaatgggcatagtagatatcagtgtgattaatcatacgtgacaaaccagaagccacattgaattgtgcataatgtaatccaagcgggggcagggaggattgtcaagataaacagccctacatccgatcacactgtggctgcttctggatgaactgcttatcttctatgcaaaataatatctgtagtactggaattattgccaggtctgttggggcggtgattcaaagtacaaagagagagacatatataaaattgtttgggactgagcgaaaagttatttattcacattttgagactagagagtgaaacatcaaagcagaggtaaaatgttattgtccttttacaaatgagaaaaccgagccttgacgaaagcaagtaacttgtccagttacccagaatcaacattcaaacttacatctgtgtactacactacaactctattctaatcacttccatcaaatagtattaggttggtgaaaaatgattgcggtttttgtcattacttttaatagcaaaaacctttttggtggcatcatatgagacagcctctactgctattctgcatgaagagtaatggcaaaaaccgcaatcacttttgcaccaacctatggtggttttgtgtgataaaccaagctgttacagataagtggagaaaagaatagatagataactattccagtaagccagagggacagatccttggcartcttcacagtacataaaatccaggaatagatcagataattaattgttagttatagaggaatagayccattaaaaagcacatsaaaattaaaagctgtaaaatggaaaggaaaccatgaaagcaaattgggttagctagggtaatgcaagctaccttagcaaacaccagacaccagtggcttagcattattgatgtttacttcttgctctcatgttcctggtgggtggccttccagctggtgatttgggtactcaggctctttctgttttgtggcactgccttctgctacagcctccgaagcccctgccttctgccggggaatgggatggaagagagagataaggttcttggtcccgaagtgacacacatcacttccactcaakaattagtcccatgccctcacctcaatgcaaaggggttgggaatgtagcccccatttgggcagccaattcccagcaacaagtccccactatggaagagggagcatgaacctttggtagatcattagccacttggctacacaaataggatctttttagccttatggacctcatattcatgagttttgcttacttacagcagaagattgaattggaggatatatgtggtgaaaggagcagagtggtgcttaatttcaaatggcaaagtttccaatcatcacggtttaaattattcctatcaaaatattatggatcaaggaaccaagatactctatttctccagctctactcatactggtttttttttcttaatattttactaactcaggacaagacttattgtcttttttcctttctttttctggtttactttttcacgtaagagaccatggaacaggccttgagttaatgtggatctcaaaacagaggcttgccaagagcctctttgatgggatcctatgagacagcttctactgcaattctgctgtcaacatgcatttctctcagaatggggctcctgtgtcaaagtgcctggtgggatgaatagatattttctctggagagaatgatttgaagtgaaaacaaaatctgattttatagaggaaatccagcaagcagagtcttcctagcgaaggtgttcctgtatagagctgtcaagcaccctgacagttatcaatttctacttgtggctccctgtaatttcagtaattttgctgaggatttgtccatgacaaattacatagggaggcaaatattttgtatttactttgagattgaagaatccaaagcctccctcctctctcccaagatttcccctctgccttcagagtggagcatgagtaggatataaatggtggagtccattaagccaagttatgggtagaacctgctggggttactaattgaatcagcaccgtcgcaaacctgtgtccttgtaggcccaaacacgttcaagtagtttggttaaagatacaattagtaaacattcagttaattatgaaataactttaatctcttattttaaatggctaccagttaatgccagctctctggccatatataattattatcaacccaacaacatgatattttttgaacacctactgtggaaaagcatgcagggcactacaggaaatattaagaataatgaacataatctcccaaatcaaggtacttacaggctcatccatgtttctagatggatgcatgtagaaaattaaacaatactagatgtagtgtattaaaggagtctgatggggcgagggaacttagatggttggcattgtcttgttaagggtgataccatgaaggacagtatgatggtattcttttttgaagtatgactcatataaataagtttatttatatttgtattgattttcctcaagctccattcacatgcggcatctcatttctatttttgtggcccttgcaatgtgacaagcaggtatcattagtccattttccagatgtggaacttgaagcagagagaggcatggctgtagcccactgggaatacctagtgtgcacaattcaggactaagcagcatccaaaacctctcttcctcctcatagagtaacgttttgctaaaamtgggtaactctcactgggtgsagtggctcacgcctgtaataccagtactttgggaggcygaggctggtgaattgcttgaggccaggagttcgagaccagcctgggcaacatggtgaaatccygtctctactaaaaatacaaaaattagctgggcatggtagcttatgcctgtaatcctagcttcttgggaggctgaggaaggagaattgcttgaacccaggagacagaggttgcagtgagtcgagattacgccactacatgccagcccaaataacagagcaagactctgtcaaaaggaaaaaaaaaaggtagttctctaatataggtacattcttctaccttaagaagggtagggaatttatacttaggcaagtgggaatagactattagataaaacttgagcattggaaattagaatattaaccctgccacttactacatgtatgatactgggggagtaatgttaacattactgagtctcaattttcccctctgtaattacaggcatatattgagaggatttatgaagtaatgtaaggaaagtacttagtacagttcctggtacatagtaagcactcacaaatttgtagcttttattttaatattctaaatttgttatggaattcataacagtggtggggcaagtggaactgtaagctggtatctccttgtggaagagggaagggggtgtaagagttgaaatccacaccaacctttccagcaggcagagggacagaggctgaggttctgtgttcaggaagtggggaaacccagttctcccacayaccgggtttacccaggggtgactttcaagactgaggggagatgtagctgtctttgggatcagtgttatgttaagtaaaacaaaaagtcttcgccatggagaagatgcattagagaatgccggataaaggaagcccctgacaatgtgtggttgtctctgagggagaaatcccagaccactaagggatgcccacagccaggaagttaacctggcaattgtactgttgcaaatcaagaactagcttcaccatctctcttttgcctgattgctcagacctacttagctaccaagaactgctgacagcaaactgtagatagtttgaaatccccttgatgaggggaagacagcttcactgagggccgaagccaggagccagtggctgaactaccaggcatgccgtgataggtttggaacctactcttctttgagtctatttgtagataatttctgggtcagatgattctcattttaaaggaataatagataaactcctggaggttaccgtgtattagagactgaaatgaaaaatatggacaaaatttacatgttgaagccctaacacccaatgtgactatgtttgaagataaggcctttaaataagtaattaaggttaaatgaggtcatgagagtaggatcctcatcgaatgggactggtgtctttttaagaagaggaagagacactgggaatggatatgtacacrcaagagaaaaggccatttgaggacaccgtgagaaggtggccatctacaagccaagaagagaggcatcaggagaaactcaacccagaaatgccttgatgttggactttccgcctccagaactatgagaaaattgagttctgttgtttaagccacccagtctatggtattttatcatggcagccccagcagacaaacatatcgtacactcaggatatgctgtacctagtgaatgaagacattgaaaatttaaccttctctaatagaatttcaagctaaaatcttagtttgattttatatgtagaatttatgctaaattctctgggtaatgttcactgtggattggtcttgtgagatgtcacaagtcattttttactactaaaaaaataaagattgtgaacggtttacttaaattaatgagtggattcaagtttattgctgtaactctccttcagacatataatgactaagagaaaggaagtggagtcaagaaagaacatacacttaaactcacactcacacatactgaaaacctctgtcagagatcctgtatctgataagtggttagcgttgtggcagtaactattttagttctgtcctactctgcatacttttgaggatgtcttggaaattggggtgccatgagagtatgtatgcttcagtttattgaaatcgagatggtctttggaggtgtgctcatttggttgatattggggtgggctgtaagagtgtgtttcacaggattatattgcttgttggtgagtccttcctaagacttctgcttttcatgtcaacaccctcataagcccattgggagtagagcttgcatcttctttatctttacacacagtgcccactgagcacagtgcctgccacgtaaagagttttgataaatattcaaatgggagttttaattttttaacttgtggagggatagcttgaggactatgctaattaactgttaccaaaataaagcaagagaaatggccaaaaacactgtctgctcaagcctataacttttctttattaagtaagaatagaaggatatgtacttcttctgtgaaagctgaaaaattatacttgcaagtatctaaagtctctaaacttcactgtagcaggtctttgaagaagcaggaaaataagaaaaccagctaatcagaaaaaaagaaaatctacgaagaaagtaaactagcaactgtttatgataacagttggcttcttttttcgggagctccatctgcctaagtatctagttcatttatcaggcatcttcagggaatgtagcactctacataactaattttccagattaccctattaagtcaaactcataaataaaaatgctttattttgggtgaaattttatgtaaaacattcaaaagctctcaatccagaggacagtgaatctaattcaatctatttctgcatattaattacttcatttcttctatttgattataaaatctaccattactgacttccttaagacacactattacatgaaaggaacacatcaattctgattgacttcaattttagaaataaaaagtgaaaacatatatctaagaacagaggaaaagtggcagtcatttatttttttatttatttatttttttgtgagacggagtttcactcttgttgcccaaactggagtgcaatggcaggatcttggctcactgcaaccttcacctcccaggttcaagtgattctcctgcctcagcctcccgagcagctgggattacaggtgtgtgccaccatgtctggctaattttttgcatttttagtagaaatgaggtttcaccatgttagccaggctgatcttgaactcctgacctcaggtgatctgcccaccttggcctcccaaagtgttgggattacaggcatgagacactgtgcccagctggtagtcatgtttttttagccccaactagataacatattggactaaaaaagtgttgcatattttcatcagtctaaaagaccccaggcatcatttgtggagaaaatttgtttgctcattgtagattttcccctggccaatataatctctcactggagacagtgtgtcagcctcacccccacccctaaagtttgccatttctaatatgctcaggagtggtaaatcagtctgttatataaagttaggattactgtaagattagggactttccagcaaactgcacaacttttagttcactgcctttagaaagctttctttttgctgtgccccagtttggggcttgttgtggatcttggttgccagatttgtgattactgttaaactataatctatcactttaacaaaacatctgtcatcttgataatggggaaagagtactaggtattaggatgatggaacaaaaaacacccaaaaccaacaccaaaaatctttccccctagaaaacaactcccatctccgcaaaaagataagtaagatggaaacatcaatgacagggacaattaagaaagttgggaggaagaaaagggcccggagaagatatcaaaaagtggtcattttgaataccttctcttggtactctactgattcgtaaccttcatgaagctaagtgagtataaaaatgtgaatcatttccaaatgaatcaataaaatgaatttcaactataaaataactgttttttaagcttcagataatactttcttcagccaatgtgtaaactgttgtgttaaagggaagctgaactatatacctgtgcaatttatcatttacagctccttttcctggttgccaaccagctaagatatctatgtttaccacataagagagtttctgttagtcaagtccaaagtacacataactctattgctaaggcaagaactctcacatgagtcactgtaatggccatctctagagaaattggaatgcatttttataatgtgagtgtttgaaaagatgtcaagttgttgcttggtgagcagagttgcttaaaagttccagagagaagctgtgatcgaggactagcagtgttgtaggtgctgtacaaggggaataaccagcaccatctaacaggacctcatggctgacctggttagaattgggtttagtctttcgaaatttgttgtaatcctaaaaatagaggtaaatctcttgccatctgtcagattttaccaccatcacctgcacatcttactgcattttctttagtaatatagctagagtggacttttctaggtaaatctgcctagtatcagaacttgaactcctctccttaaaaatctatgttgaactgatgcactgtatcttgtttctgcaactagttttaagctccttgaggtatttatgaccttgtgtctcctacaatgacttgagtccaatagatgttcaatcaatattttgagtgactgctgaattaactttgtaaaagcttctttggtacaggaactatgaaaatatttgctgttggtgactgtacatacatgaagttcacgatgctactctgtaaaataatacttggggttctttgcttagcagcagtgaatgatgggggctgctcctatagggaaggcctggctgactttggaagggcatagccagcctttggaaataaaaaggacccagcctaacttggccccaaaggcctgctggcttttaagtattaattttatagagataaatcatgactcagtcaaatataacatgaacacatgctatgatgtttaattttatttgtaaacttgtctaggctagagtacccagacatttggtcaaacattatttagatgttgccatgaaggtatttttagatgagattaacatttaagtcagtagactttgagtaaagtggattactctccaagctacagatgggtctcatattcagtctttgtacccaatccattctttgattgggagaatatagaatactccacctcctgcacaccttattatcacaccaacacggctccattattataacagtggattatggctgaaattgctgaaagacacaggccatgtctgaagaggagatacttaaggaagcccaaagtcaagaagtgagacaaaaacaaagaccaccagaggaattttcagacctctggcatctgtaactacgcaacaattatatagctcaactcctagccagattaatataaatcctcacacacaatgaaggctcgtttacttcagttcctcctgcctgatacagtgtgttctgccttcaacagaaaatgataggacatgccaaatagcaaggaaaaaaatcacacacacactttagagatgttggggcagctggacccaacaccaggccatgggggcgacaaagtccggtggagtcaaaagaatgagaaaagacaagtttaagagtgcataaagtgggaccagggggccaacactagtgtggaggttgtgaaggctccgagctctgggagcccatgctatttattggtaatccaacaaagaagcaggtggtgaggatatgagggttgaaaggaagtggtgcatcaagtgcataagctatagctgtgatggtttagcatttcctttgaagcatatggaacatattctggtacttgagataatggggaacatgttcttctagtttaagatacaatcattttataagcctgggaatgctagaagcaaggagccagtaagtctagacacattccagaggccatgaggggttttatgccctragccctggattccatccaagccacgaggggttttatgccctgggcttarattatggtgtggcagggcagccttccaccctttggcacagagcttgttgttccaaagaccatgaggggtttcagaccctggacccccgacatgttccaagactcttttacattatgtcagagatgcaagccctgcctcagcttttttcccaaaactcagcttttccccaacataaagaaacaaaacaatcattagacccaaactcaaatattacacagatgttgggatcttcagatagggagtaaaaaaataactatgattgatatatgaagagctctagtggaaaaagtagacaacatgcaataatagatgggcaatgtaagcagagagatggaaatgagaaagaatcaaaaggagatgctagaaataaagaatacagtaagagaaatgaagaatgtctttggagttcaaagtgaaatcaactatccaaggaaagaatcagtaaacttaaaatgggtcaatagaatcttctcaaactgaaatgcaaaggaaaaagaaaaagaatggaaaaaaatggaacaaaacaccctagaactgtgagactatttcaaaagatgtaacataagcaatattggaattctgaaggagaggaaagagaatggagtagaagaaatatttgaagtaataatagctgagaacgttttaaaactaatgacatatatgaaactatagatctgggaagctcagagagtgccaagtaggataaatgccaaaaaatccaccaccatttaggcttatcatattcaatcttcctcttagaggaacatggataagaattacatcagacttctcctcagaagccatgtgagtgagaagagtagaatgaaatacttgaagtattgaaagaaaaagaaattacccatctagaatttttatttagtgaaattatccttcataaatgaaggagaaataaaggcttcttcagacaaagaaaaactgagggaatccacctctagaagactttttcttcaagagatgttaaaagccaggagaacaatgatayaggttggagactcagatctatttaaagaagaaagaacatcagagaagaaataaatgagtataaaataaaatctttttttcttattttttaattgattcaaaagaactttttaaagcaataatgatatcaatgttttgggttatcatagcatatgaataagtgaaatgaatgacagcaatgtcctatgggatgagagcagcttattgggaatactctgttataaggtccttggagcacatgtgatgtgagtggaatgttatttgaaatagatttcaatttagatggactacattctagggacaccacgaaaatttttaaaaagawgtataatcaaaatgataaagtaaaatgagattatataaaatccctagttaaaaccagacaaggaagaaaaacaacaggaaaagagcaggggaaagaactctgtattttctttgcaatttttctgtaaatctaaaattattctaaaattaaaagtttcttcaaaaacgttaaggagcttgttcctgtattttttaartagatgatggtgattatttaatcattacrgtttttagatatcatggatacattgtggtatttagacttcactggttaaactaaaaatgtaatttttagttgtcgatgtttacaagatgctggaaatatatgttcttaaaactattcaaacttatgcaaagtaagaatatagatttcaacttcataaatttaaggggatatatggtgttttaaaattctttcagtttgtaagagcaaaaagttataargctgtcggcctgtatttaacccatgtgggaacagaacacccatcaggcttatgttgaattgcattttgtgccagagaagggtggagaatggcagttgttggttaggtgaggtgcaagatccactggtgggccaattactaaccgatcatccctctcacctgcccaccctcaggagagctgccttgaatggcagcctgggggagaaggaccttgaagtatcatccaggctctttgaggaagagtccagaatggtggacaatgtctgttctgtgctcaggattgcgggtgttcaaccacatgcagtatatttattaagcttggcccaggtgagtgctctagtgcgaatgtaaccgggagggaaaaccagacagagcatagtaggatgaggacgaccctgaaagaactcatgtgtggtcgagggtgtgtcttgtgctggggatttgaaaagtggggtttgggctaagtgaagttttaatgacaaggtgaaaaggagttcattttagtcgaggggaggctgttggtcttgggccaggagggcagataattgtactgagaatggtgttggcagcttctgctggagagctctgcttgcctacagttggactgggattgaagtcacttgtgaagactaggggcgtcaacaaatatgaattttgtcttacttggttttgcctgatgagattctttattttttaacatctagctattaatatgtttaagaaattatattttaaagattctgccatagttctgaactggccgttttttcattggtggggattcaacaaattcctctaattggttttgatcccagtatctgaaattctgatctgaatccaataaaatgcagagttttagattccttggcaggagatcctcactcacatgcctctgaaaagaagatcccttagtatacagaaatttggggagaatgaattagatacctttgaagaattagtcattgttcatgggtttatactcctggtcattgatatttataggactactgttggtgaacttgcttccaccttaatctttgagtaacaatgttaggttggaagaaaatgaggactctaaaacctctaggtatactaccatgggcaatacaaaataaatctgcttgattattgcataaaaaaatagaatatggatcaacaatcaggatatctttttattgaacaaaacttccagtagaaccaattctctggagtggccatgccaggctagtggcccccaggtgtctggtgagcagtgactgcaggacaagggccaatctcatgtgttctgagcctccctgggctatacctcacatatccttttgaagttggtcctatgtgataggcatatggctcttaattatcaccttacatgaactaatcctgtggcacttgttctgcatttatagctcttacacatgcaacctgtaccctgaagctcaaaggtttccaaactgccaaaggacaaggtctttttgggggatggcctaaccaggaggtacccctagtatggggaatttgcatgctatccagcatagaaaatttccagggttcctttctcctggggtcctgggctgggctcacctcagcagctatagccattcacactccactagtcatagccatctatatttttaagtgttattgacacctgcttctctagtagcccatgtggtactatttttaaaaaggatcttagtgatagaaacaagattctttgacttatcagcagaaaaatatttccctcagtgaatgaagaaatcttgttttcatatatgtgaatcggctcaactggatgaaatttatatgaagacaatacagattttgtttgcttttctcattggaacgtgtcccaaggatagcaatcaaccatcaagatagatttaatccagacaagactatattttcttattactgtctctagaaagtaattatcacctgcttcttgaaatgaataacttccaagaagaatggtctgcagttactgtcttagatttttctcatgtttttcattcccacttgcttgtactgcatcagttataacctgtgagacaaagggcagcacacaaccattttaatactccttggattagtttaaattcatgtcatctctagggtatatttcttctgggaattcaaatagcttcaacaacatcctgccaggttcatagattactgagggtcctaagttttaaaatccacccttctttggggtaactaagggcagcatgaagtagctgagtgatgataaaaggcagtttaggggcataatatgggagctagtgaccctgaaactgatacttttcctggagagctttagaagaattcatgattcagatggacacaaaacagggtacttcatacagcttttgatttctgccctgagctttgaaacaaggcctccacaaactccggaacttatggagcacacagcccttattcctgaggtttccccatgctgctcttaggaagacatttagtgactgtctttagaggcgaatgcaaaaagaaaacccagaaagaaagatttcctcccttcctccatatattcatgtgagtaggtacctgtttcacagaatgatatctcatttatggtgttgttagaagtattatcctttgttttgtgcatcytttgcttaaaaatatccctacagtatttattgtataattgaatcaaataaagtgactcaaaatgccactttgttaggattaacagttttcaaaagactttcatacgttatcttgtttgaccagcataggaaccctgaggggctcacattcttgtcataatatcacaagtgacaaactctttgtcttaagaaggtaagggatgtgcccaggccactggattaaagaacagtagagataaaattagaagccagattccctgactcctttagtccaatgttcagttcctaaaatgtctgaaaggactcaattaggaataacgggaagtggatgttgggaggataactaaatacttgttattgccatattaatttagagtacaaacattattctgtacccccttcctggatctgtcaaagaacacaggagcagacacactctttgattcaattctggcagcaataactgtagtaggggtgatagggtgattgcaggagaaggttacaaggagagggtaggttccctttctagactgtccacagaaacttctgtggctttggcaaaaagatttctgtcatcatctagtacaacttctgagggtctcgcaccattggagtttgtgcttatatcttctgcaggaagattagctggttctagggctgatggacttgaccctagggtgaagacagtgttggtgaacaggtccctccagtcaggggcttccctcttgctgccatctctgcttgctcaccattattgtctttggtgttttgctcaaagagtgtgtttgttaggaccttgtttccaaagctttagggtagccagagctcagatcacttttgctttactgtgggatatttaccttgtgctttgggtgaacagcttargtagctagctgcttggtgttttgaaatatccatgtttccacttagaagactggtgttttgtttattttaatctgtcatgtgcagaaatgaggcttaactgkgatagatttcctatttgtgtgtggaggtgtgagttggaaggtgtacacttggtctgttcttgtaagggctgaggtgggcagagcaaagggacctggagatggggcaaggatggcaatgacttgaagggtctgtgtgtgtggagggaggaggcccagtcaggatgctcagagtgaaactggatccacctgctcacagagcgtggctgggtttcattcatcttgccattcattattccttaccagaattaattatcagtgcatgaggaccaatgatgaaccaatctgcacatagatgggtttctgttcagacacagggggcttgttgcccttcagggaagctctgcctcataatcactcttctaaatgcctcagggcacccatccctatgggttctgggaggtccccagactcctttgtcccttttacttctcctgccctgtgcatcttcctcccttccctgggccagcaacactggcctgtttgtattctggggctccattctttggacttcaggcttctgtagttttcttctagcctaaaagaggatgaatcatgaactctaccttgcagagaaaaactggaaaatcattcagggagaaaacagactcaagtcttgaccatctgcttttacagctactgcctctgctttcatctcagacagctaagcctgagcacctgagagtatgtcagaggagaaactacagcacaggcaactccacccctccaataccgcttggttgggtagggctagaaggagacattgtggcacaataggaaaagcctgggatttggagtcagatagatatgagttcaaattctgtctctgctaattactactttaaaatagtttctaaacccagatccaacctaaataaaatgaatcagtctctccaggtggggcttgagcatttgcgatttctaaaaacytcccccggtgattctaatgtgcagccagagctggatgccattaatctgacattttgctctagtttggggagatttcctagtttcccagattctgcactgcacatctctctgtgatggtggatactcactctttctccaggctgtgggcagccaaacatgcctcctttttctaagactctcagttggccctgactgtactgctttttgggagttgccaatattctttatctttctagatgacttcattgtgtattgacctttgttacatgctctcttgagttttatcccttcctttctttgtattatcttgatcagtttctatcataattcattggtctttttggtaaagaagagttagtgactatcttctttcctaagcaggtcttgatgagtcaagtaaagtgagaactgttcttggatgttctgaagctgcttttaaaatatttatttatattcctcatctcttatcaatttcttctccttaaaaatcctttgttttcatttatatttttctcaactctcagattaacttcttatttgtctcataagatgcttgtcaatatcccttctgtgttttctgatgatatagtgaccctcccagacttcaaccaaaatcatatcactaaatattaaaaacaaaggcagggtttatcttaaactcgtgtgttccttttaactcttgtcaaatgagagcatttggatacaaccttgaagactcagcggtgtggtctattcattgctcacccaagtcagttacactgaactgaataaccatgtaaatgattttgctgctcctcctctttctcctccttctcctcctcctcctccttcttcttcttctgtctctctctctgtgtgtttaacagagagattcttctacatgaatttttaaaaccatagcaactgacttgaaaaaatacaaattagaccaaccacctagttttgtcctcgcactgctagagtaataattttaaattaaaatttttgccagcgcttgagctttttaaatttggacttcctgaaggacttggattatgcttctgaattgtcctgtgcaatacctagaacatgccactgggagctaaaagtgctttggtgctggaggtggtgagggtgctgagctcttgacaatgatgctgtgtcattagtgcactgtagctataattaaggttaaaaagatacaatttgccattgtgtcattgagacatgcaagtgtcagttattcattcaacaaaaatttgtgaattattgagtagttttatgtgctaggagctatgtgtcattcagttattcattcaacaaaaatttgtgaattattgaatagttttatgtgctaggagctgtgtgtcattcagttattcattcaacaaaaatttgtgaattattgaatagttttatgtgctaggagctattatgaataaagatgattcaacataaatttttgtaaagtttcacagtaaactttgatcaatgtttttatcgtttttgaatagaggtagatacttatagtattgcatacatgattaaaaggaaagtattctaagagtaaatatcaggtaaaaagaactttctaccaataatattgaatatgactttaaacaatttggtctgactcctccctcccagccccccaccccttccagcttatctggtttgcctgctctcttttgagatactttacaagataaaagctgcagataaattatttggaattacccaaatatgtgaatggtttgggaaactgcatattctagacctttgcaaaccaattttagaaatttttagatgcctgttaattttttcctaggctactagattaataaccattgttgaatcagaaatgcatccatcttccawaatgacattattgcaaaatccccaaattgcttgcaattcctacagtaggccctagatygtatctacacagtgtgaaatgtacatgtgagtaattatacagaaagctcaatcagtatagatctcagtctggatgattaaagacaagggctttctcttcatcttaagtgggtttattttaaatgagtataacatacctctataaataatgtacttttcaaggcaaagtaaacactctatttatcttgcattgtttgggaatggagtgcccatgttaacaaattttacaaaaactgaagctcgccacttcagaagctttttgtggaaactattttgtagtgaaaaaccttgaatgtgtagttttcatgtttatggctccttcagcataatatgctgaataaaatgtgagtttcttaatggtgagtatcattagaattggcaaatagtagtaagcataactgatctgtatagaaaattttaaaggcaatgaatagtcctggatgtcttttgaacagactttaaaacattgtctttttattgcaagtctatttgatgtgacttgttttctcattccttcattcgtggaactgtaaacccaaaataaaattctaggcacccctagccaaaagaatggatcttcctcttggccaaagggatcccaaagaaacctgaagaactagttccagccatgatgggaagggagcaccaggacatgcctgtttatactctcctctctttggagtttagacacaattgatcagcattaacatgaaaacagaactcttatgactgacaaaacagactttttgtagcagtaagataccaaattccaacctgactctggtatagtaccacataacacagcaggtcctgaaagaaataaaagtattttaccccacaatatatttctttgacatattttgaaatggtcctgcaaagctgtttcttgtcgggggaatttgcgttctatagagactctccttccattactagtttttttccagagtctgatgtcttttaaggtctgataagagacagtcaccatctattctctctgaagccttctacagggaggctttgtctacataacaagaaccttggcttccacaatcccccctatcttaactcaggctgacttcaactgtttctacaattgccagtcaataaatctttgaatttacctatgacctggaagcacccctcccaacctgcccatttggagatgggcaaaccagtgatagcttacgtgtgttgacgtatgtctttacctgtaacttctgtctccctaaaatgtataaaagcaagctgtaactcaaccacaccttgtgcacatattctcaggacctcctgaggctctgtcgtgggctggctcttaaccttggcaaaataaacctctaaactgattgagacatgcctcagatcctttttggtttatagaacaaatatttatagtgtgccagaactctttgtatgcctaacttcaatacttcttctctctacccctttaaaattcctggtttctaatctgtgatgagtcgttaaaccagaaaagcaaagtgactacacttgtatgcaaaataagaattaataggatccttgaagttctaaatgtcctgtttgatatcatcatgttcataaggtttagtacatgtccttagtgggggatgctattggcacgtcctgctcgcatgcttgctcatagatgtgtgtctgatgcctgtaagtttgggataaatgaggtgttataactttttagagttttttttttttttcttctccctggaaggaatgagcttagaataccacaggtgtgtgttgtaagggcatattgttgagtttgttttctcaggaattgggaaaaaacaatcctttccattggctttttgtagcatcagcatcaatgcagtttgggtgtggtagaagcaaagacatggatacatgttactgtctatcccaacccacatgataggttttatggaccattccctgcttaataatgactcaacaaatgttgagtatatagccatgtgtgattccgtctttagatctttataaaaatatactttttgattggaaaaaaaacttatttgtcagatcccatgtcccaatttttggattgcagaatatggtcacttttggagtaaaagtgggaaatggctgaaactttgatagaggttgctgtgaatatcttacagacggcattccctcctatgttcccctgtgggaagtggagggaagtttcctccctttatcaaaatgtaagaagctgggtaataagtcttgtgagctccacccctccccagttcccactcagtgtcaggagcactgctgaggctgctgctactgctagcattgtcttcctttcctttcagctgctgcttggtgacgttagaccctgataaataagaggacccagaggcaaagagactttagtgcaagggtcattcttcggtcccccatagcattttatttatactactcttagcacatgcatcctaactttaatttatgttagttacgctgaccggattgtaaacacctctgagacaagggactgagtcttattttattattatgsgtgtctccaggcctagcattgggcctgctgcagagtgggtgctggcaaatgaatgaatgaataattgaatgaatgtgcgcttgtatcattgaaagctctccctgaccttcgcattgatggatttttatttgtcctgagagcttatttataggttttcctttcaggtgtatgaactttagtgtgaaaagcaagagttagagaaggatgaacttgtgccctgaagtcaataggagggaggttctgtaaaagggaagtgcaggcctggggcaaggggcagagttgaaataactgacttaatttgtaaaggaaatggagaatgccccaggctcagggctgtcagccaagtgggttttcaaaagcactgatttcagttgaacaaaggaatgttgtgtcaatatgagaaagtttttatcgttttcatctactcaggctgccttctcttcactatttctgtgtcttgacattttagaatggatagacccctgtatcaacgctagcactatccatgttctcttactagagaaggcattcgagtttttgttgcttttgtcataatggaaggttataagataaaaacaatttgttaacttgatatttttgtccttacatgtatgttctagaaatgagattagtttaacaatgtagcactatcactgtagttttaaaatgaaattggaacataatcactcattttcttccattttctccccatgaaattgtaatattggaaagagaattcagtgttggaggaatttatttttttgtagaactatattttcatgattttctggcccacagagatcctataaaagaacggcaggyaagcctgagcatcagtgactcacagagcattcagtgctccaactgaccttgagtaaaatttctgggcatttaggagaatgatggcataagaggagattacccttcctcaaacgtaccacaaatcagataactttacagtgttcctactatgaaattttagattatgaggcaagagtcasacagttttgccgtataaatcagaccagtatcaactcacgtaagctagtgtgattttttttttttttgtattggtggtgctaattgaatttgctggaaatgtttatgtaataaattttctactttaaagatgctgtgccaggagcataaactagtttcagtgcaaagcatgttacacagagaaagttgccactggaatgaatgacaaggattacattaatatcgtgttattgtctgaattacacttatgaacaaaaatgtcattaatraactaaggctaagaaccttagctatgtcataaagtttgaattctagtgggcacattttaaaaaactgaatcattttttgaatcagtgtacttatcagagcagagatgtacatcaaatatagcatctcttttcttactctgaaaagctattcttaagtgagaggagtcctacattcatttgatggtgtcttagcaatcgtggccaccagaaggtacaaggatatgaagtctcttggcagagacttggatgaagcacttaactattcaagacaattccctgtttcttttcataccatcttgaattcatataattgtggaaaagcatgaagtggaatagcgcatgttcaaatgccttgaaaaagtgaaattcatttttagggtattattttcttaagtgtattaggccattctcacattgctataaagaaaaacctgagactgggtaatttataaagaaaagaggtttaattggctcatggttctgcaggttgtgtgggaaacatagcttctggtgaagcctcagaaaactttcattcaaggcagaagaagtgggagcttgcatgtcccatggcagaagcatgagcaaggcagtggggaggtgccacacacttttaaaccaacagatctctcatgagcttagagtgagagctcactatcaccaatggggttggcccaagtcattcataaggtatctgcccccatgacccaaacacctcccaccagtccccacctccaayactgaggattacaattcaacatgagagctgggcagggacgagtatccagactgtatatcaagtgtcatcctaaaactgttacacaatgcacttgtttatgcaatgggccctattagctgtggttggtgtaaaaacctgttatttaaatagaaagtttcttccaatacaataattggtgttgaaaaacaaaaggctcctctattctggaaaattgtattagacattattcttcaatttcaatgtttactgtagcatcacttccagaaataaatacttaggtgtttaccctggtcatgttgcaatgaattgaaaatactatattgacatattgatatatttattgttttctctaattaaagagaaaaacatctagtagttttctttttttttaaattaaactttaagttctgggttacatgtgcagaacatgcaggtttgttacrtaggtatacatgtaccatggtggcttgctgcacccatcaacccatcatctaggttttaagccctgtatgcattaggtatttgtcctaatgctttccctctgcttgccccttaacccctgacagatcccagtgtgtgatgttcccttccctgtgcccgttcattctcattattcaactcccacttatgagtgggaacatgtggtgtttggttttctgttcctgtgttagtttgctgagaaagatggtttccagtttcatccacgtccttgcaaagaacatgaactcattcttctttatggctgcatagtattccatggtgtatatgtgccacattttctttatctagtctatcactgatgggcatttaggttggttccaagtctttgctattgtgaatagcactgcagtaaacatatgtgcgcatgtgtctttatggtagaatgacttataatcctttgggcatatacccagtaatgggattgctggatcaaatggtatttctgattctagatccttgaggaattgccacactgtcttccacactggttgaactaatttacattcccaccaacagtataaaagcattcctatttctccacatcctcacccgcatctgttgtttgctgactttttaatgatcaccattctaactggtatgagatggtatctcattgtggttttaattttcatttctctaatgaccactgatggtgagcttttttcatgttttttggccacataaatgtcttcttttgagaaacgtctgctcatatccttcacccactttttgatggggtcgttttcttttttcttgtaaatttgtttaagttccttgtagattctggatattagatctttgtcagatggatagattgcaaaaattttctcccattctgtaggttgtctgttcactctgatgatagtttcttttgctgtgcagaagctctttagtttaattagatcctatttgtcaattttggcttctgttgccattgctttcgttgttttagtcatgaagtctttgcccatgcctatgtcctgaatggtattgcctaggttttcttctagggtttttattgttttaggttttacattttagtctttaatccatcttgagttaatttttgtataaggtgtaatgaaggggtccagtttcagttttctgcatatgactagccagtttgcccagcaccatttattaaatagggaatcctttccccatagcttgtttttgtcaggtttctcaaagatcagatggttgtaggtgtgtggtgttatttgtgagacctccgttctgttccattggtctatgtatctgttttggttactgtagccttgtagtatagtttgaagtcaggtagtgtgatgccttcaggtttgttcattttcctttggattgtcttggctatatgggctctcttttggttccatatgaaatttaaagtattttttcctggttctgtggagaaagtcaatgttagcttaatgggaatagcattgaatctataaattactttgggcagtatggccattttcacgatattgattcttcctatccatgagcatggaatgtttttccatttgtttgtgtgctctcttatttccttgaacagtggtttgtagttctccttgaagaggtccttcacttcgcttgtaagttgtattcctaggtattttattttctttgtagcaattgtgaatgggagttcactcatgatttggctctctgtttgtctgctattggtgtataggattgcttatgatttttgcacattgatgttgtttcctgagactttgctgaagtggcttatcagcttaaggagtttttgggctgagacaatgcagttttctaaatatacaatcatgtcatctgcaaacagagacaatttgaccttctgtcttcctatttgaatacactttctttctttctcttgcttgattgccctgaccagaccttccaatactatgttgaaaaggagtggtgagagagggcatccttgtcttgtgccagttttcaaagggaatgcttccagcttttacccagtcagtatgatatcggctatggctttgtcataaataactcttattattttgagatacattccatcaatacctagtttgttgagtgcttttagcatgaagggatgttgaattttactgaaggccttttctgcgtctattgagataatcatgtggtttattgtcattggttctgtttatgtgatggattacgtttattgattttcatatgttgaacaagccttccatcccagggatgaagccaacttgatagtggtggataagctttttttttttttttttttttttttttttttgagacagagtcttgctctgttgcccaggctggactgcagtggcatgatctcggctcactacagcctccgcctcccaggttcaagkgattctcctgcctcagcctcccaagtagctgggactacaggtgtgtaccaccatgcctggctattattattattattttgtatttttagtagagatgaggtttcactgtgttagccaggatggtctcgatctcctgacctcgtgatccgcctgccttggccttccaaggtgctgggattacaggcgtgagccaccacgcctggcctggataagctttttgatatgctgctggtttcagtttgccagtattttattgaggatttttgcatcaatgttcatcagaaatattggcctgaaattttcattttttgttgtgtctctgccaggttttggtatcaggatgatgctggccttataaaatgagttagggaggagtccctctttttctattgtttggaatagtttcagaaggaataataccagctcctctttgtacctctggtggaatttggctgtgaattcatctggtcctggacttctttttggttggtagtctattaattactgcctcaatttcagaacttgttattggtctattcagggacttcctcctgttttagtcctgggagggtgtatgtgtccaggaatttatccatttcttctagatttttctagttgatttgtgtagaggtgtttatagtattctctaatggtagtttgtatttctgtgggatcagtggtgatatcccctttatcattttttattgtgtctatttgattcttctctcttctttattagtctggctagtggtctattttgttaatcttttcaaaaaaacagctcctggattccttgatttttggaagagtttttcatgtctgtgtctccttcagttctgctctgatcttagttatttttgtcttctgctagcttttgaatttgtttgctcttgcttctctagttcttttaattgtgatattaaatctttcccactttctgttgtgggcatttagtgctataaattttcctctaaacattgctttagccgtgtgccagagattctgatacgttgtgtcttggttctcattggtttcaaagaacttatttatttctgccttaatttcgttatttactcagtagttattcaggagcaggtttgttccatttccatgtagttgtgtggttttgagtgagtttcttaatcctgagttctaatttgattgcactgttgtctgagagactgttatgttttccattcttttgcatttgctgaggagtgttttacttccaaatatatggtcgattttaggataattgctatgtggtgctaagaagaatgtatattctgttgatttgtggtggagagttttgtagatgtctattaggtctgcttggtccagagctgagttcaagtcctgaatatccttgttaattttctgtctcatcgatctgtctgatattgacagtggggtgttaaagtctcccactattattgtgtgggagtctaagtctctttgtaggtctctaagaacttgctttatgaatctgggagctcctgtattaggtgcatatatatttaggatagttagctcttcttgttgcattgatccctttaccattatgtaatgcccttttttgtcttttttgatccttgttggtttaaagtctgttttatyagagactargattgcaacccctgctttttttttttgctttccatttgcttggtaaatattcctccatccctttattttgagcctatatgtgtctttgcacatgagatgggtctcctgaatacagcacaccaatgggtcttgactctttatccaatttgccagtctgtgtctcttaattggggtatttagcccatttacatttaaggttaatattgttgtgtgtgaatttgatcctgtcatcatgatgctagctgatcattttgcacattagttgatgcagtttcttcatagtgtcattggtctttataatttggtatgtttttgcagtggctggtaccagtttttcctttccatatttagtgcttccttcaggagctcttgtgaggcaggctggtggtgataaaatcccttagcatttgcttgtctgtaaaggattttatttctcctttgcttatgaagcttagtttttggctggatataaaattctgggttgaaaattcttttctttaagaatgttgaatattggcccccactctcttctgggttgtagggtttcttctgagagatccactgttagttagatgggcatccctttgtaagtaacctgacctttctgtctggctgcccttaacattttttcctttgtttcaaccttggagaatctgatggttatgtttcttggggttactcttcttaaggagtatcttagtggtgttctctgtatttcctgaagttgaatgtttggctgtcttgctaggttggggaaattctcctggataacatcctaaagtgtgttttccaacttggttccattctccctgtcactttcaggtacaatcatagctttggtcttttcacatagtcccatatttcttggaggctttatttgttccttttcattcttttttctctaatcttgtcttcactcttcatttcattaagttgatattcaatctctgatatcctttcttccgcttgatcaattcagccattgatattgtgtatgcttcatgaagttctcgtgctgtgtttttcagctccatcaggtcatttatgttcttccctaaactggttattctagttagcagttcctgtaaccttttatcaaggttcttagcttccttgcattgggttagaacatgctcctttagctcagtggagcttgttattacccaccttctgaagcctacttctgttaattcgtcaaactcattctccatccagttgtgtgcccttgttggagaggaattgcaatcatttggaggagatgaggtattctggtttttggaattttcagcatttttgcactggtttttcctcatcttcgtggatttatatacctttgatctttgatgctgatggcctttggatggggtttttctgtgggtgtcctttttgtggatgttgatgttattgctttctgtttgttagttctaacaggactctcttctgcaggtctgctggagtttgctggaggtccactccagaccctgtttgcctgggtatcaccagcggaggctgcagaaaagcaaagattgctgcctgcttcttcctctggaagctttgtcccagagggacacctgtctgataccagctggagctttcctgtatgaggtgtctgttgacccctgctgggaggtatctcccagtcaggaggcatgggtgtcagggacccacttgaggaggcagtctgtcccttagcagagctctagggctgtgctggtaaatccactgctctcttcagagccggcaggcaggaacattaagtccactaaaagccgcacccacaactgcccctacccccaagtgctctgtcccagggagatgggagttttatctataagcccctgactgaggctgccgcctttctttcagagatgtcctgccaagtgagtaggatttagagaggcagtccagccccaggacctttgccacactgcrgtgagttccacacagtcagagttaacactgtgaggggtwwaaccacctactcaggtctcagtaatggcagatgcacctccccacaccaagctcaatcgtcccaggtcaacttcagattgctgtgctggcagtgagaatttcaagccactggttcttagcttgctgggcttcatggaagtggaacccactgagtgagaacacttggctccctagcttcaaccccctttccaggggagtgaacggttctgtcttgctggtgttctaggcgccactggggtacaaaacaaaacaaaacaaaacaaaaaaactcctgcagctagcttggtgtctgcccaaatgaccacatagttttgtgcttgaaatccagggtcctggtggtgtaggcacatgagaccaggaatctcctggtctgccgttgcaaaagccatgggaaaagcatagcatctgggctggagagcacagtccctcacagcacagtccctagcagcttcccttggctagaggagggagttccctgactccttgcactttcccaggtgaggcgatgccccaccctgcttctgctggcccactatgggctgcacccgctgtctaaccagtcccggtgagataagccaggtacctcagctggaaatgcaggaatcacccaccttctgccttggtcttgctgggagctgcagaccggagctgttcctatttggccatccaactggtagttttctaacatggttctatctgttagaggttatttgctaaaatattcataggtttgcgttcacattcaacacatatttaatgcacttatattccacaaacatttattgagtgactgctttgtgctaggatctgggtgaggaactgtcacatgcttcagtttatttaattctcatgacagtacactatgtaggtttgaacattggcattacaaatctctgagtaggaaaacattttatttcacaggccaatgaatgactcactgaaaaagaaaaatcgtttcaggacacacagttgaaaaatacatgaataccaggcaatatgcgtgtgtgtataattgtgtgtgtgtgtgtgtatgtacagacgtgtgtagggtaaatagaatatatcctatccatccattgtgaatataaagcataatattctgtttacaaactgtaatgtatgatcacaggtatacctgtgtcctacagcatagactgtttgagattgtgtggggctgggttggggtgggcaggaagagaaagggattaaaaacgggacatggagtgtgcacatatgcatacatggaaatcggggtgagtggactatgctgacagacacaacttgcatatttgccaaacccctaattattttatgaatactaattttattggaaaattcatagttttaagatttaaaattggggaaaattaggaaaattcatgattctttgaaatcactcttcattctcagtgtaaataatctttctactctagaaaatactgctcatgacttagacattttattttttattaaaataacaaatgtacatgtaaaaaatggcaaacattatgatgcaaattgtctcccttccaccctagagacaccctagtcttcagagtttgtcagtggtttcttgtgtatagcaccaaaagatttcgatgtaattatgtgaacatataaatataaatgtaaatactttttaaaacacaaatgcaagatactatacacattggacatcttttctttttttaagagtttttcctaagcatcctgtatcaatttccttcattctctttaaagactgaatggaactttattgtatgtgtgaaccactgycttccctagtgcctcacatatgacagacaatcaatatttgttgacttaacaaattaaatatttaactattctccccactgatgggtaggggcatctggctgatgataacagacatattcaaggaaaggaactaataataaatataattaataatgaggttcaagtcagtgagagaaacctttatcctttggagtccacttaacagtgggggctctgtttaaagaaattcttcagctcttatcttgatagtgatgaatctgtctctctcatctctctctcacacacactcatgcgcatgcacacacacacacacacacacacacacacacacacacacacacacacagaaatgtctacttttagctccttcaaggataggaatacattttctaccaggtcatttctataactctggcaggttgagccatatatttgagattgagccatatatttgagaattatacattgatacctgaattaaagactgctttttggctgttagctctacttttatgtaaatgaagcagcattgaaagcttcttgattggttgggattgattgaacattgaagttccatcttttttttccatcagttttccctctgggaaaaatgtgatgctttggactctccagttggttccagcagcagaacagagcatgggccagtgcccatttacttgaatgagagaggcatcgagtaaaacgttgtcttccttctgaaccctgcttatatataaactcgggggttcccaaaaggaaggagcagctgctggaggaaatgacattggaaagaaaaggctctttcgaggtgcctgtagctttcattgattggttgatcacacttgtctaaaatgctgcaaggaagagatttatttgtgccagtcatgatgcctataaggcaacaagcaagtgccttctgtccctgaagttggaattcaaagctgattgcatgggagacatgggaaatgcttgtcagctcagaggaatcttctactcagctttgctacaaattatttccttgaatatgtctgttattgtcaaccagatgcccctacccatcatttgggagaatagttaaatatttaatttgttaagtcaacaaatattgattgtctgtcctgtgtgaggtatgagggaagacactagatcatatatacagtaaaattccattcagtcttaaagagaatgaaggaaatccatacaggatgcttaggaaaaactcttaaaaaaagagcaggtccctttaaagttttttgggagatcctaatttatcctcctctactgaagttaagttactctaaatgaacagtgctagccaaaatgatagaaacctcacatcaggattttaaaactcaagtttctattggtttcaaaccagagctacacaggaatgagatcttgaatagaaaaaagctgaatagaaaaaaagttcatcttaggaagtagaaattataacacctatgtctagaggatatctttgtataagcagaggacttggatatagctgagcttggctctgctgagagcaaatcccacttcttttattatgttaaaaatttattattattatttaatttagaaatcaggtctcactttgttgcccagggtggtctcaaactcctgggctcaggcaatcctcccatgtctgcctctccaacatgggattataggcatgagccacggtgcacaacccaaatctcacttctgagctcccataggcttctaacttttcagtgtctaagctttcytgtaagtgtgttgtcagacacagacataaacacttgacaaaaaatatttccaattattcctaagcaaaatgtcattttaactttgtataatactagctggcctcctccatgttactcataagagaatcattaaccatgattatataaattccagctgctattcaccctgaaccagtggttttcaactctggctataccttagactcacctggggagcttttaaaaatgcaggtgtcttggggccacttgtcctgtcctcctcccacctcccacccccaggttccagttgatctagtctggctgggacctgggcacccacagtctttaaaagttctccaagtgattctaacatgcagctggggttgaaaatcagtgcatctgagttatgttgtgtggtccaggtgagaagcaactcagtccaaaatcagaagagcagtttagagtatctgccattggaatgattgattctggagccctcaatgaagacctctgtatgttttctctggttagaggcctccctgcagtgtttcagcatcagccactcggagtccccccagctctccctgcccaagttgattcaacatatgtcactgctctatgtttagtcctagcttcccaaatgcatactccaaatttgatgaaaatgcacccaagctgacagaaacatctttatatagagagacgcagaaagaaaggatagaggcttccaattctaagaggagatccactttcccaatagtcataaactgtgttgttcttgacattctttcaaggactttgtaatgagaatttttaaaaaaaataaaactcattcttgactccacacttttatcttgaaaattgacatttttttctttttcttataaaccactgagtgaacgattttgtttcttccactgtttctctaagcatagctgtcagcttatacaattgtaaaaatgttgcataaacaggatgcagttcatacattttgtccacccaaatcactttgttatatcctcatttgcttcaaatacccaaatgtaatttggttaactgtaagagaaagatatgccagggaagtttaatgatggcttgtgcatagattaaagtcttccaaatacattttacctctgaaatgtgctgcttaaagaaaataaacatttatacatattcagaaaaataggcatgcagaaaagttagtaggattacagcctccagattgacatttctggaatataaattcagaattaaaactataaaagctctatcactatgcaaatgatggggaaaagactgttaaattataagcaaaacctggctctaattttagagagaattcttgctaggggcaatgagattttatattttaacagttcaattccattagtgtttccaaagtatttcctgaagattgttaaatagagtctacacaaaacaatctgaagaatttgtaagaggggccaaggatatcacacaagaggatacttaaagaagagtcggatattatcaaggcagactcctttttcattcttcatgccgtgaatttcataagcttacagagatagtataataaagagtttaagaggtgagttttggaggctgacaggtttcggattttatctctaccacctatcagctgtttgaccttggaaaattactaattaacctctcttaactctaattttctcacctatagaatggatacaaatacgtatctcatagacttgtaargcttaaatgagctaagtgtataaaayacttatgtagtgcttgatacaacatcaatgttctgcaaataattatgttttattattattgataattgataacatggccatgctaaaaaaagttattaataacagtaaaagcattatataaaattaaaagtaagcaattttatttaaaaatagatatctggttatgccttattttcttgataaaagcatgagctggtgtttttttattatcaagctttactctgtcaacttctctctctctattccacatattagccagaattaaattgccaacagcagtaaaccctttggttattttcagcaggagatgatttgatatgaggagttaaatgtttacaaaatcactggaagaactggaggagaaggttcttgacttggtttccaggaakgaatcctgaaataacaccatatagaactgaccattaagggaatgtctccccctgccgcatcctggaaggtgagaaattggggagccagtgtcccaacttctgaccttaggatcgcatcatttacttactctctacagactagaaactcctttcagaatcgctaactacaagaatgcacagtgtccgctgtgttcatgcccatctctctcactcccaaacaatctgcatgagacctgttctatctcctcttaactcagttttgaattcaagtattatgcaataatgactgcttggaggaaactaagtcacatctagaactctagtttcaagaatggatagaaagtgtactttatgtkttctagcctgtgccatcctaaagatgcaccagacaagggttagagtaggtgccagatgagagtcaacctaccttatcatttggacattgatttttcagtagcctgagtttgctttaggctttgagggagcatttctgaatggctttgattccttgagtgattccctcttctactgaaaactcagtcatggatatacatgcacataagggttaatagaatgaatggtggyaagaaatcaggcatattagaagggttaaactgttaggatggagacttgactacgagttttctggtggacaggatgtaaaggaaaataggatgaatagctggaatcagaaaatagtcataccacattttctggagaggccatgctgttttcctcacgttgggctcaataagagctaatcaaggacagtgatcaacttcgagggagccaggggagtatacaattgggaaaggatcttttaattaattatttgtgtatcctatttcttaagctggcttgtaggaacatgtgataattttattattttttacaactccatagatyttcatattatatgtgtaaaatatttcttaataaaaatggtgataaaaaaaagacttaacaaggtggctataccctgagatcagtctcctttggctttttctgtcttttactatctcaggagagttctccccaggccaccccaacctcaccccatgaagagcatatgtctcctctgcccagggattggaggttgcagggagcagctggttctgaggagggtggctttgctggagagacaggagcagaatggatgtccagaatagtgtagatttagggggaggggaaaaagagacaagatgtcaaggaaacttttggggagcatcctggagatatctgtgtgtccagatggttaggattgactcctgtcctatggtatactggtagcaaacaggagacagtactagtaccagggagttaaagggaagcagggactcagtgtatgggtaggacgttgagcccacaggctgccaaccctagcccttgtctgaatggatgcccagaagattggttgatctccaggtcaggctttgggcttttcaggcagattccacctaagaaataggggtagaaaagggaagaggaatagtggagaggatgagcatgagtgcagatttaggggcttcacaggaatcttccttaagacaggcagggagagtgcagcacagcctggctcccaggcaatgaggctgctcagaggagccagaaaacgcaacctacacctgccaagtggagggtaggttgggagcaccacaggcgtggatgcccagatgtcaccaagcaacctggggtttcaacacttacccttgcagggccagcctctaacaggtggactggattttcccctaggcaagcatttaaggtaaagcctggtgcagctgaaaaattcccattaagacacagtgtttataaatcttgaggcctgatttcctggaagctcaaaagtgaagatcttgcttttttggtttctttttacgtgttggtttgccctcgtttttttaagggtaatacaggttaagttctagtttaaaatggtggcttgaggttagggtcttttttttctctcttgaccagaagaatccatattattttcacttattcatttcctcaactacctttctcaatacttgtgtagtagttactatgtgtcagagggtattctaagtacttaacaagttttaatttgtttactcctcataccaccatatgaggctttcttattattatcactcccattttcagatacagtaactgagacacatcgaggttaagtaacttgtctaaagttatgcatctcgtcagtgscagaggtggtatttgaacccaggcagcctggttcctggccctgtgctcttaatgacagtgctctgatacctaagctaaatatttatttgatatgcttgtactgtctagtccgagttcttgggttatgccctggcaccatggctcaactatttctgttgtcttgagtgttagttttctatttttaatatcttgacaagttagtaaacaattggcaagatacttacatttgaactttgggatttatctgtaagccctgccttaatatgatttatttatagcattgctgattattattattatttgcacgtaacctgatccatggcaatgaagaaacaggaaagaagaaaagcaatgccattcagtttgttttacattagtctgtcccaccagggaacttagccatcttggctcagatagatttagcttggagtggagtggtatcacatagtatagtagaggcttctggctacgcagggcagattaaatacatggattttcctctactctttcatgaaaccgttttatgtgacagcaaggcaatgacgaaggtataaatgcacaaraacaaaagggaagcagaaatgacagaagaaaatagatgtcaacaaaaaattgaaagctggaaatgatatggactagtaactgacttagcagwctataaaagcagaaagcctacagagaaggaatgcagcaagagggaagctcatttgtgctgcaraacagcagaaagactcaggagctggaggcctgaggaagctctgaacgaatggttcatagtcttcagaggaacaagcagatttccagatcacctcctcaacgtgcacagctaagcagctctttctccctctttgctctgggatgaaggagaaatcacttgggtcttcgtggggttacagagctrgcctgagggtacatgcgtgacatatacctacacacaaatgaatactattttgcctcagttagcagtttgttgcaaattttattcgtgtagtgtgaggtattctgtttccaaaactttgaagccaggatggaataaaattggaacatagaatgtccctgtcatgcttaacttgagctcagaacattgaaactacaggtgaggtgggagattctgattaatatttaattgatatctatcattgaaatagaaaatgaacatgttaaaaaaattggtagctactaattgatctgtctgatacaataaatcaataaataaatttacattctaattaaggagacctaatcaccccgacctcttgtaaatctcctggggcttagtactggaatggccttcaatactaaatgtccttgacagtctttgatatatggggttgtgggtagcactcaatattatttactctagtgttattttttccatagggcttaaatcagggcagtgatttgaatctaaactattcaatatgttatttctcacaggggctttcccagagcagaggtatagatattttttgcaagtcatttgataaggcaagttgatcaagcatcatgattatataggaatatcttactttgaagagtgtgattatttggaagaaacatgaaggattatgaagcatggaccaatagctggccaggctcttaatgcagtttaatgtaataattggggacagggaagcattattgattgattctgtggtttttcgtgtttctcttgttagttcagttttttttttcattcagttgctataagaaaaagcaatttatccaaagtgaatcttaagacagttgatgttattaggtgaaatatttcttcagcaggcctattcacagaaccagagccttaagactagtctagaaaggcttggttttggcagggtaatgaaacataatgcttggagactcataggtctgactcatttatactcaggttgacattaatttgttttaaagagcaatatttatttgtgcttgtggcatttgtgagaggacataaaatcttgaagggccctcgaaaaccttaaagtgaagttgatagctgtaaaaattttcttttcctgtaaaataatctctgggaatttagagcacatcatctaatgtaacctatcttctatctgcgaaaagaaatttaaccctaccgtaattaactctgtttatcttgtggtgatatttgggatggagtcaggattgggaccatttacctataggcgggtgtctctctacctgtggctggataggaggtatacctttcccatccaggggtactgcctcattttgagctgctgggtcttcttgagccacttaagtttctgtccatgcctggtagtaggattcttccctagatgggctatggaatacagtgtatattttttacaccaggattgatagaagaatagcaatgtcaaacccctctcagcatcaaatccatacatttcacttcattgaccaagtggtggggacctccagtccattgcctccagaaaggggtgycaataaatgtgccaggaactgatactgtcatgataggtgatctgatggagcagcccctcaatattatgcttcacacttatcataatttaatataaactagtattttgttttgtctagctctcccaaatgtcagtttttgagccaatgcggtttgtttgatttactgtagtctcctgacacctaaagcaggacctggtgcagggttacctgataaatacaggaatgaatgagcaatgccaaagctaccccrtaacctgtccttgcccagggataagtaaatttgcatgacgtaaggtcagaataaatgcatctgttctcacaccaggaaaatggtgtcatatgaagattgtccatgaaccagcagcatgggcttatgactgacttgcattcctggctcttttagtgattttctgttcttaagaagacagtttggtttctgtggtcttactttctacagctatatcatagttatcatgatatttccagatatctttttaaagtactcagtaattcaattttatttgacaatcacttacagcctgagatgtgcaaatcaccatgtaggtttgaggggttttaagaatgaaacagacagtttttatcttcatgcatctggtagcttactcactagaggaagtcaatagtaatagtattaataatataacaaggttcagtacatgatacccccccaaatctggtaccttggcatttgagaaaatggcaaacataggaaggttgctctctggctttccctcacacttctcctctgaggcaggtcatgagaccctcatttgagaggtgccccccccatacctggcagaaagtaacttccttatctctgaagacatggagcacagagaaaatctgaacagacaggccttgctaagttttccccgtttattactattagatcatacctttttgtcccccaatatacttctgcacaactgttcattcttcgtcaaacctaatcataaaaaaatacaagtctacttgtatctttgggttttcattttcaaaggcmctcatgtcacataaaacttatgttaaataaatgtgtatgctttcctcttgttaatctttccttttcccccacaaatacaaacaataacatttacataagcatgtgttatctaccagacagttctctaagttgctaatatataaaaattatcacagtaacctctgtggtggatcctaatattattgcctttcacgggttagaaaaccaagacacagagaagttagtgtagctgtttaaggctaactaaacccagataaaaattctctggattcagtgaaatacaaagtacatgcatatatcattaatacagaaaaatgcttaagtagcatcagtctaggccaattttgtcaatattaacactggcatttgggcagattttcacagtgaggttatttggtggcaggctgccaccctcctggctaggcagggatttttaggaagatacagccacatcttgacaagacccaggttgaaggactgtgatgcataagctgagccttgagtgttggaaatactggaggccaggcatggggctggggctgctggaacgcatttaggttgggctattaggcagagattgggataggaaagcacagttcttactgtgtgaagcaggaatttattaaaggatacagactcatggcccacagaccagagtggacagcagtaaggcttacttgcgattagatacttaaagtaccttaaattctatcctgggtagcaaatggattggttccagagggatgatgggatgagtgwatatttgaaataaatgaatgaatatcattgcatamctgctttacatcaggcggtgtgttcagcactttcagataccttaccttgtggtgaggataagtaggaggaactagacgaaatggagatattgggggcagatgagaaaacatcattgtcgcataagtggtccttctgtgataatggattcattcctgagcataccctgtcattgctttatagtaatgatgcccttcataattaaactggagtcttctcttccaaacactttttaattggacagcaatttttgctattataaatggtacaaggcagcatttaaaatagaagaaaaaattcaagataatcatgttataattgtctgtgtggcatgggtatcttttacccaagttgttcttgaggcaatgtcttatatatttggtagcttaatgttcaacctttgtgataactgaagaagacaactgataataggaaaaaaggaatcaatttacctaatctacawatccttgccttggaaacacttagagtgagttgactatagctaaagggaaagggattatgttaggtctgctatttgctttcactagattcctcttattatagctggggtaagcattcatatttaattaacaaagagaaaaatcaaggtatatgttaacatttggatatagatgaataaagttggatgtagaatcactaagttcttctcggaacttcttgtcataaagctttcccttccagtctgttaattttatacatgtaattcaagctattatatttgtcttgatgtgatagagttttcccatgataatctttaccttctctaaagtaaactatattttaattaagatcttggactttgacttcttttacagttgttttggaaaaattttgtaattgatgcatgtttgatataaaattgactttgaaactgacctgtaattcagattggagttgcttgaaaaccatttgagtaattttgagccaatgtgaaytatgtttatgtgaatttatatattttccctttttttaccttggacctaaaccagattaactgtatggcatgtcagtgagcaggaatgaggataattgctggtttaaaaatataactgctgtagatctagctggcatacaaccctgagatgtgggcggaaggtagcaagctgaagggagatttatgaagtggactgtgcaagttccttttgraaaactttgttctttgtgctcaagagcagagatggaaagccagcacacagatgccgttcagtagctatagctgaaccggttttrtgaggctgggattggagaactctgtttaaggacaaatataagtttgcacttggtccttcaaaggggatgacacagcatctctttaaatttctctagactgctcttgtcttrgtcccagaccacagctctcagacttgatcacttgrgttgccttaaatsatgaaatcaccccaccacttgtcttattcagatttttgtgtcttttgtctgctgtttctaagtttttccatcrtcacatctctaatttcacacctgctgcctgcccttctggctccaggttctggctttgtctttctgacccagtgttgattgctaccaataacctcccttcctacatgacccaaataggacacaattcattatttatgttttttttttcaccttgattcattctgtaatagaatggagccagacataacctccgtaaagcattaactcgtatcttggtgattacttctctgttaagaaatgctgaaatttcattccaacattttcattgaaaattcatgtgcttggcagtgtactacacagggagctaaaatggaacttgaaacaggccctttgagttgtaaataacatggaagaaagtgtagccttaaaggctagcatcctttctttgtgatgataatgaacctgtaccaccactccatttcagggatgcaagctgaggttcaggatgctggagtcctcagactgatatggtgaatcaacagagcttggaagacatctgtttctgagctctagtgtctcttgatcaccaaaactacaggttaaaatatgaaatattactataggttaaaatatgaaaaagtgcttggtctagccagacatttaaggtcaagaagacaaaaattagttcaactatgtgggcaaacattgagtactaatatatgaaataaaataatcttcatttattgtctttgaaatacatttctgtgtccaaaaaaaaaatctattttccaaataatttctagccagctaactctgttgtcttttttaaagaaaacagccctcttggatgcatcttgctgaattacagggaactaattccccatgccacaagccaaaataattttttattttatatatatatattttttgagacaaggtctcactttgtcacccaggctagagtgcagtggcatgatcatagctcactgcagcgtcaacctccctggctcaggtgatcctcccacctcagcctctgaagtagttaggactacagctgtgcaccaccacacctggctcattttttgtattttttctataggtgggatttcaccttggtgtccaggctgatctcaaacacctgggctcaaggattccacctgtctcggcctcccaaagtactgggattataggcatgagccaccacacccggccttttatctatgttttaatacaccatgatataaaaatagtacttcctctcccaaagtcaatctcatttcagaagcatggttttgagcaaatgaaaagacatctgtatgttaagtcaaaatattctgaatatttatggtaataactatatgacaataaaactgtgagattgtaaggttaacttgatttgaagtagaattctctcttcttatctattgtttcagaactaataggtttcattgacttttctcctccttactgatcatggtgacctgtacatatatataatttggtctgttaacatcacttctgcctctgtagagtaaccctttttgccctcgaaccaatggatttaacttatgatttaaaaaattaacacactgaaaataccacctgcctgaagcagsacaacagagaatatgaaagctcctgtaatgctttggatagaaagctatggggtggtgattctccaatgggcaatgggagagtgaactcaattttgcttccttaggaggtatggacaacaggcagcacactttcaaagaagtaaacaaggaatctcagtggctggttgagatacaggcaatagggtatttgcacagattttctaactgacttgggggaaatttatttaccttctctcagcctcagtttttccatttgtaaaatggacataatgaaagcatctggctcataggatggtggtgacagttttcagtgaaatgatgcacacctggcttatagtaaatgggaatgacttctaattctagagggacccaaagggaagcctcccaggctgcacatctcatgtgatgggcagaagtgaagatccagggtgtgctggggagattagcagggggwttagtaacaggtgctaccttctttggagactagctaacggaatgaggtttgctcagttttggtggctaatacagaatgctgtagtaaatgtgaggaggggccgtgtaggaaaagctcagaggttacttcagtactgagccccttcagattgtccttttcctggaagttacacatcaggtagaaaggccacaagtagcaccacaaatatcatataggcctctctcaattttcaaaggattaaaatctaatcaagcatattaatattaatattaaaacatcctagttattatttaattttgttgattcagatagaacttcaggatttgagatcattgttttatatctatagctatatgttataataaccaatatgtaccatcatatagtatatcagatagtcaggagtgattgttgttaaaacactaataattttaccatcactggaatttactaktttgcatgtatgtgtgtgtataaactaaatstaaaatgatatcctgttctgaatatatgtaagcaattgacttacatatttttgctagttttaggttcagtatttcaacatgagtattccgttttaaaaaatgaacctaaaaattcaaatccagcctatcgaattaagccaaaagtgcaccacaattgttttgaagttgagccactaataattgcaaacactcttctggtgtttacgtgggccaggccctcttaaatgcattataaacttactcctcacaccaactacattagataaagctgctattttcccccttgacagaggaggaaactgaggcagagaaaaattgagtagctcaagctcacacagttactgagaagcaggcagagctgggattgaaacccaggccatttggctttagaggccatggactcatccaccacatacatggcctcttaacttacaggctcgtgagaacagatgtattcttgaataagaacctattacagtcaaatcatgttcattagtttcctgagtttcactgtgctactagcttttgaaaagtctcttcttggtttctttatttggtcaaagctggagcaagtagatagtgcctgtcacccgtcttctggagtatggggtggagctggtacaagacagcaccaaggagacagggacagctcaattaagattgttcagcagttggaggaacaggagtactaatgctgtcagcacctccagagcagtcccaaattaagtgccaacaaaatgaacagatgtgggacctggcaagcagttggaaagaatactgcctgaagaactgtgcaaagttgaaaaagaggagagggcagtaagagaagagtaagagtcaaggaagaaattggggaaaaggaccatcttcagggaaaagtattcctgctttctggggtggacccaacttgyttctggctgcagtagaagtcaccctgggcgtgtttccatttttagggaaaaatatatattgcatagtgattaaacataccctagaatagtggttctcaattaggagagatttgacctcccaggaggcatttggcagagtctggaaacatttttagttgtcacaacttgggggtggatgctactggcatctcgtgggtagagaccagggatattgttaaacatgctacactgcatgggacagcccccacaacaaagagttatctagtccaaaatgttaatggtgccaatttgcggaaactcctgctttagtgccagacagcctgggttcaaaccctgacttgccatttactaattttgtgaccttgggaaaggtacttagcctttgtgcctgaagaactcatctgaaaaatgaacatggtgataatactatatttcaattaaaataaaatgctgtcaatcataaagtataccttcattttatgaactaccaagaaaggcaaaccaatgccaaataagttatgatattctatgttttgtacaatgcatctctatttcagaaatattaaaatgaggaaatgaatgcatctcagaattgataatctctggcatgacatctcatagagtttggaggaattaaataaatatatatatgtatatatttctatgctgtgcgtcccgatcattgcagtgatgaatctgagagataaagcacaagaggactccagccaaaccaagttagtcattcattccctcattcattcacttgttaggcgtttgtcaagcacctattaagtatgtaaagatgactaagagggtctttattaaaaatccacatatttatgtcttgtaatttttaaaattgtttttcgttagaaagcttgtaggaagtcccagttggtgctaagttttatattgcttccagaccctgtgtgtttcttgagtagagcccgatgaactgactagaataaccacaaccctttaccacgtaagaggacaggagtaattgcctcagtcggagttcaaccagaaagtagagccagtaggagatacataataagagacttcttgcaagcaaaagcctgatttgattgtgagggctgactaggtaaatctgaaatctgcaggggagaccattaggaagggcatcctgaaactctcaggcaaggttgaagatgctgtccacaggcagaatttattctttttcagagaygcctcagttatgctttaaggcctttccacccagattatgtagcacaatctcctttatttaaagtcaagtgattatggattttaataacatttacaaaataccttcacgtcaatacctagattagtgtttgattgaataactgcaggctgtaacctagccaagtggacatataacctagccaagtggacatatatcactgcaatgtttgagtcgagtgccatcactttttaggtgtgtgaccctgctgaaagtcacataaagtattttagycagtttcctcgtttctgaaacaggaataataacattaactacgtcatatctgtgttttgtggactaaatgaggttatcagtgcaaagtcagaatatgtattcctggaggtcatggacttgactttccatctttatatatgtggcatggcacagtcactgataaaggcattcaaactgaccatgacagcacacctggatgcgccctgcagtggtgggatgtgtggagcatacgctggaaccagagtactcacgcacccttactgtggaggggcgttttggtcatctgctacccagacagatagtgaactttggcaccaccttcaaaacttggcattgagattaaatgatgcaataaaagagaaactgtgattctatcaagaagcaacaatttaaaaaagaaaacactattgactgttttcaccatttaaagattcaaaagaacaatttctagtttatacagcaatattactaatgactgatattactaatgactgaatgccactttcagtcattactgatgactgaatttcacttttttagcaatattactaatgactgaatgtcacttttgtcaagctttcctactgaaaacatttaaatgaagtcaagataaaagttgtcctattattcaatcattgtgtaaatactgggtggattttaactttttctttagctttttatttatttatctcaccctgcccctcccttttttttcattctgttcttctatttctcctataaggttttatttcaccttagttatttggtggcatgtaaatacttcttgacttgaatgagtaattttcacctctttccaggtaatttctaacactgaaagtaaattactctgtacaagcatattcccaaagaacttctgcacagagaagttaactcactttatgaatggcttcatatacgagatattttccagctatgtataataaatctgcttatatctttgggatttttttcacattcacatattttattattttgtatttagattacttttcgccctgaaataaattgcctgccaatgagttgcaatacatttgctttcaacaaagaatgaaatgaaagggaggaatataaaattataaataaatgtataaatggtattaccctaacaaaaggatgcttatcatagtccagtttgtggggcatgtgattacattcccatcgttgctcacagacagaacaacctcacagtagttcatataactctgttaggctcatggtttataaaatgggactcagacacctgcttctcataaagttttacaggttctaatttattaaaaatcttttatacttgctgatttttcttggtgataatctctgtatagactgagttataactcagagttgatcttacctaggcaggcttgcatgttttgggaaggaggaaatcatgcacaggaatgcagagaatgagacttaatttttatgtaatatgtcttggatggcacttttcttgctctcggcatccttgaacaaggaaatttattttgcatttacctatagggtcagaatttcccatcatctgaaattagttctggccctgaggtaagaaacacacacacacacacacacacacacamcccacatatcaagaaatggttggctcattctcaagtcctattcttgctcttcagtttctctctttcattctgccttgcatcatagttatttatgtacccagcagagtacctggcacaaagtatatacacacrtgcattcgtgcacacatagcagctactgaaggcttaaaagcgtggtgttaacctctctacatacattattttatgtgtaatcatcaaatctatgaggaagatactcttattcctattttaccaaagaagaaatggaaatattgggtatttaaaaagcttgttcaaggtcatacaactagtaaatgcaaaagccaggctttggaatggaaggcattatactctaaaggtcacatgctagactcctgggctagcccttcttttattcgctcactgctgcatgagtgaatgcctttccctctcacccaacttgaaggttcctgaatcccttctctttgtagcctatataacacctgccattgacttggcaccaacaaaaatgttgttgactcaacagtacacgtggccaaaagcatggggatttctgatctgaatatcatcctgtatcaagaccaacccaaaggaaatgtacctcactctacacttcatttatttaaagcaaagttaaaattcaggaatcacagattgactttagtctaagtgtaagcttctactgtaatacaaaaagttaacatgctcttgagaattattaggagaagttgacatttgagagataataactaattggatctcatgttattaacacttttaaaaggccctggagaaactagaagcatgatgtaagaataagtgagatgatttaaggtgttaaacatgggtgtttgtgaggacatgacttgagaatgtttaacataaagagaagaaggttatcgttagataatggtttcaaatgtgaagattttcgaagaaactgctagtgtattagtctattctcatgctgctaataaagacatacctgagactgggtaatttataaaggaaagaggtataattgactcacagttcagcatggctggggaagccccaggaaacttacaatcatgggggaaggggaagcaaacatgtccttattcacagaagcaaggagacgtgcccaattctccttcttgcagcaagaagtgcccagcaagagggggaaaagtcccgtttaaaaccatcagatcttgtgagaactcactatcatgagaacaatagcatgggggtaaccacccacatgattcgattacctcctaccaggttcctcccttaacacatggggattatgggaactacaattcaagataagatttgggtagggacacagccaaaccttatcagctactaaccaattttgtatcaacttgagcacaagaaagtgtgtctaaagtgaaatatttggtttggtgttcattattcatctaacctatttattcaatgtccactatgctcatagcaatataaaggaaattttgaccacaggggctttaaaagaagataaaaatttgtgcacattaaattgtatagtttccattgtccagttaacgtgggaaattgttttttggctctaaagtgtagaagggatttattttactgattctttatacaagataatcctgcaagaaaaggtataatcttttcaaatagacattttcatctctaaaagttttgtaaaaatagatggcataacattttttttaatccagtattttgtttttcaggaagccaagataacaaagtccaggtctactgacatctaattatatattagagtgatgatacttaaataatctataaaaatagagatgttctataagaatccacaacaatacagatgttctctcttatgtttgaaaccaagtggaatattatcaatttgtgacttgtttgctttttatttcttgggtctagaatactgtatggcacaatgataatctttaagtgttcattatattaaatggaactaatcatttggtatttcatagtgaattcatactattaggctgtgagctgtatgaggccaaggtccatgtcagcttcacctgtattctccacagtatctaatatagtatccagcccatagtaagtatgttcagccaatatataaaagaatgtaaaaattaaaaaaatctagcatactttttaccrtgtttattagttgaataataactaggtaacacattcaactactggataaaatgctcttaatttatgatgataaaattatttcatcaacaaatatggttgattgacagaggatccaaacctttttccataagccatttaaagttaatcagttataggcatgaaacatagaggataggatgcataatttacaattaaaatattaattttacttgcaattgagatgggagttttaataagatctttatttagtgttttttttttctttagagaaatgatggaccacctgtaaatgctggaaaaaagttcttagttgttcttagccatttctatagtgagtcgaagtagtatgtagcagggatcagtagagtaatacttatacataaaacttgctccatatttaaatatttggacacagtggatttagatttttttttttaagtgagtggagatgtgatacctccattcaggagaatctgaagaatctgcaaaattaacaattgttttaggactctaaatctaagagaagttttaaaaattgtatatagattttttttttattttgggtgatttgctcgcaaattttgtgttataatagcagtgtctctagatctggattcactgttagctctaatgagaaccaaacgaagagttagaatgttttatcttcctattgcccagtcctgtgtcaattcaggctggattccagcttctgtcctaatgtggtgtgtagctgaaaggacaggcattttccgaaaggctgcatatagcactctctkttcttgtggataaggatgattastcatgaaaccaagaaaatcttcaaaatcttcactctgaattttcccaccagccaaagttcactgttctacatacatatgtgcaattataaatgacatacatttgtataaatgtgcaattatacaccaacgttgaaggtcagaataagtttatgagagaaatgaccacttcctatcatgtctcaatcatatttatctcaataatagagatacccaaagaactgattattaaataagcattaatattggtcctttgactaaagttgcaaatgtaatttcctagacatctcatgagcagctgtaaaacataattagattgtaataataaatgggtttgaccaagtgacttcctatttgactcaggcaaatctttctcatctttggagaaatctctcttaaggaatcagtcttcccattttgggctcctcactttgaagctttgggaaaagaatagactatcctgatatttaatttttaagttattataatacaacattccaggctgactagagtatatagtacttgaaggttggcaggttatacaagaagtattaatgcaggaattgatctaagaatctgaccttgtggtatttgagtgacatttacaattcaccagggtactgatgtatgaaaagttggttctttagartttttcaccagttgaatatctttattattagcattgttcttaaggttataaaaagttcttccttgtattttatgactttttgtaaaaataggatctcttgactttaatttctagcagaaaataaattataatttactaaaagttttgagcattccatacaacttcagatatttttctgatttatatgacaagatttggtttagcattttaaaacaatattatgtagtatcccatgactcccatttgcaaaatttttaattttctttcagaaatctcatttttcctgaaaatattttaatattttcattagaaatagaatggttttataaaatcactattcattatttaatgccttaagtctagttaatgattatttccttaggaaagagtagtacagcttttgccttaccataagttagcatgtgaagtttatttgttcaaatgaaatatgcagttataaaatattctgatatgtaacagaaaacaaaacattctgatttcagaaataagacatacttgtttgataatctcagcatttggtttaggaagactaggacagatctattatgtagactctatcaggtaactgataagtaagtgtacctacccatttcactcaatatattatgaactttttaatgttaatcgatattataaatagtatatcaatattataattatactatatattacataattctaaattgcatgtgttataatgataatgatagctataaaaattgaagattttttcatcgtgtgatattacaataatgtttttaatcaattccctgttagtggaaactttgctgttttccatctttgctgccatagccagaacagtgatgaatgtctgtaaatgaatatttcaggatatgcttatttattttattagatgaataactagaagagaaatttttaaatcaaaggatacctacatttttcaagtttctggcaaatattgccaaatgcctaccaagaagatcatactaatttatagacccatcagcaatttacaaaagcaaccattttttcctgtgctgcttagcacagagttttactattgtttatgatcctagccaatttaataaataaaatgaaatcccagtgaaattttaattgcatttctgaggctcatgaattcttctaggcttattggacatttataattcttctgtgaattgctttttcatttcctttttatattttccgtaaaaagcatatttgtgtttttattgatttcacaagtctcttagaaatgatactttgttataatatgtagtaaatagattttttctcatgtcctaatataattttaaatcttttacaattataagttgttattagtttgtttgctctattggtcttttctgctttcaagctttgatgccatgcttagagaaaccttttccactcacaaattatataaatacaatatatatcttacatttattttaagtatttgtatgagtttacttttctacatttaaatctttaaatcttttccatttggaaaatattttggggtaagttgttaaaaatgcattaattatttttacagctatacttgacaaacgttatatactatttgttcaataattcagacttttttactgttatgaaataaatttatcatatataagtcctatcctgtgacttagtattttttcctggaaattctatttattctatcagattgttttctcaatattgacaatagtgctgtattgtttttatttttaaaatttatatttttatagatggtaggacaagacataaaattacttctcttttgaattcctttttgtttagaaattacttggctatgtttaaaagtttagccttctatgttaaattatataataagttctcaaattttgcaacaaatccatagtttagaatttaatttgagragaaatttatatctttaaaatggtaagcttttccatccaaaaatatgatgtggatctcactttcttcaatattcattttatatcccttagtagaactttatagttttcttcacatggaattagagaatttctttttacattttttcctagatatatatactttggctgttatattgaatagaatagctttctttatatttttaaatgttattgaacctttaatgggaagatacttatttttgtgtatctgtttggtaatcacttactatataatatttcattatgtgttctaatggctttaaaatttattgaactttttataatctaaaagtaatgaaatttttgttcaatttttcwttccttctacctacttttttggtcttatttcattgactataattcgtaaccattttttttttttttgtaaataatgctactagagggcatccttgccttattccagtccttaatagaatccttttattgtttgttcagtaaatataatcctggctattgtttccaaatatgtattctttatcatttaaaaaagtcattaaattcctggtttactatgtaattgtttaaatcaagaaaaatattgaactgcatcaaatttttttttagtatctgtcaaaaagatcatatagacttttgtgaacttatttatttggtacattatataaatagattttaaaatattgaaccattcttggtagcatgaatctgaagaacttattaaacaatgacaacactgaaaaagtttaatttttagatttttaaagctgaaaaccacactctgaaacagaaaattctaggatactcaagaagtcaatagggcttcatagacaacaaccttattttgttgtgatatagctgcaatatatgaatatatattgctatatatgaatatgtataaaattaccgagcttttttcttcacataaatattatatgggatattggatatctagtacatttttgacagctgttttgtttccatatttattaattgatagtcattatgtttgtgtagtaaattttaacttactgttaatataaaagataaaccatctctaacctaatattttggtagtactttcacaactttcaataaaggattgtatattacagtaaaaaaaaaaaaggtagccaggaataaaaagataatgaatgttacttagttctttttcttgttttctagaaggtgtaacttttagaatggcgtatttcatataaggaacaataagcatttgataaaataatttattgtgtatttgtaattatgcaacagacatttaatacaaatgggttgatatgatgagagagaatatgaaataaaattggaaagacttataaaacaattattatataagtagagagtatctgtgataggctagggatttttctttttctacttttgaacatttctttttgtgggttttaatttttaattaaagagacatttagccartggtattgctcttttccaatatgaaaaaatactacactttcgcttttcttggagtgaggtttcttggcgtaactgacattttgagccagataattttttgctgtggggctgtcctgtgtattgtggaatgtttagcagcatccctgcatacctattagatgccagtagcaccttcctgttgttaacaaccgaaatgtcttcagrcattgctaatttccggtgggggacagaattgcaaccccccttgagaatcactcccttaccatgagactataatggggaacatattcaaggatccgtttaaagaaagcctttgggcaraatgaactgggtaatagattaatctgctatttacataggcctgctcatactaagggtttacacattcttttcattactgtacctgcctttgtccttctctgtctcccgcacgtggaagcctccttttttccaccctgtctcttattcttcccttgatttcaacacccttctcatatatgatgtaaaatctgtattgctttttaaaaatayataacacttgttaataaccgggcatttgggatcwcccggggcttacactatcagctgccgcttttcactgcattgtgacctataggcaagactgagttgtagaaacgggactgtccggccgggcgcagtggcttacttacgcctgtaatcccagcactttgggaggccaaggagggtggatcatgaggtcaggagatcgagacaatcctggctaacacggtgaaaccccgtctctactaaaatacaaaaaaattagccaggcgtggtggcaggcacctgtagtcccagctactcgggagactgacgcaggagaatggtgtgaaccaggtaggcggagcttgcagtgagccaagagtgcgccactgcactgcagcctgggcgacagagcaagactccgtctcaaaaaaaaaaaaaaaaaaaaaaaaaaagtgggactgcccatgctcttggtaaggatcagtactaaaagcaacagtccactaagggcactgacaggatgccaggctgcatgaattatggagcgcttcagacagaggcagggaggggagcaggtaacttctttactcttttatattagaaatataaataacttcttccagttgaaatctagttgcaatggaggaagccacgctagtgaaagatggtcatcttatctcaagccctttatttctgccctttccaaaatttccattgaaaatccaaggattacaaaaatgagacaaaaaacatttttgcacatatatttccattgccttccaaacagtcttaccaggtttctgtgattactgggagaggtagccacgctcacgttctgctggagaaaaagaggaggttgctataagtgtttagatgcttagcaataagcatcaacaaatttagaaatatttctctcctttaatcctgattggacttctgaattttgtcttaatcaaataaaagccaaaataacaaaagtgtacaaaaatgtagttacaaaactttcattttaatacagtttatgacagcaaaaatcagaaacaacctaaatgtcctgcaatagtggattttataaattatgatatgtatatttagagacaaactatgctgttattaaaattatatcagagaaaaactcttaataacaagggaaagtgtttataatacattaagtgttaaagcatactatcaaataaattttgtagagaagtttaaactctatggatacatgatacaatataataattatataaacattttatgttaatagttgtaatccctaggtggtacaattttatgtgattttattttctaataggtattttataaatttcccacaataaccatagattcttttaaaaatacaaataaagcaaaggtttttaaaatttaagaaaatttgtgggagactatgaaaggaatttctaatgataggtatttgtgaaatacttatttcgattattctcttttaaaagaacatgaattaaaactttatttgtatctcacatttttcagtatagtaaacacacacacacacacacacacacacacacacacacacacaaagaaaccaaacccttctgttacttaggaagtgttaggaaaagtattaaataaaacctgagaaaaaatatataccagcattgtaattgagaatgttctgtggtgagtaaacaaattattgttggttttctgactataagaaaggaaaaaatatatatatttaaaaaaacccattggtttgtagtcttgagcagaagttcttctaaccaaaagcatgtgaatatagaagaattaatgagcgttggagattctatgctttattcaggaaaaacaatccaaatatgtaacaggacccttgagatttggcagtcataatgatgcacccatttgtccttgacatgacgttaactggtcctcagagagtgtccagagagagacagaaaacaatattagagaaaagtagtattcagagacaaaagggggagagatgtttaaaaatatgctctcgtcattgtgaggtaaaagtgaagtatgtcaaattatctgagcctgtttaatttatgagatcataggttcataatgtaataatgccacaaaattggatatgagagaaaaccaaagaagtgattgaaatattcataaaatagaaaaactggtttcaaagatagctgtatgccatgatttgctattttaagtccacgaatgtataatcttacatgttttctgcccattacctttgtatcttaatttgtaataggacactttccttgcgtgacaaaaaaactgtctcgttttaaatttacaatcatcacttcatgtcaagttcattgaatccatgccttccctgactgcacctgcatcagcagggaagtagagccctgtgacagcactccagagcagcactcgccaaatcccatgcaataaaaccctctaatcctgggggatttacaagaaaaatacaagaccttgtcagatctaggagggaaatgacgtacacaattgcttcatcgtggagagtctaagcgcacatcagtgtaaaaagctctgagctggtgaagaccaaacaaactttgcttaacttagtttaacctggatttctcaaatatttgtgcaacagaaatcttctctccagcaatgcatgttaacatcctgtgggctagatgtcctgtggtatacagtttagaaagcacttgtcaggataattcaaaccataacaaggtcgtttaattattaagacaattaacaccatgacaaggtagcttaattattccaattacttggctgaaagtgttgtcccaccccacaaggtcagaattaccatcaattgttatgccatttcacactctggtctaaagtcagaccttggtttctgtactttaaaaaatattcccaggaaattagaatgcaatgttggctttgggaatcattgcactggatttagaacaatgccaatagtatcaccaatatcttacttcttcaagagatcttctgtctttttttcctattcttatctctttatcagtgcctgctgactggctgctacggaggtgaatataccacaagaaggctaaagaaagctttctggggagtatattcaacaaggctagctgtcagttttaagtaacagtggtgggaataaatccttaccaagtagatcaaaagagctagtaggagtgaacagacagaagtccgagagtaggaatctttatttctggtaataaattcacgtagtttggtgacctcatgtctcatgtcttcccaactactgtgcattttctgtacaggtcctgtttctacccctatattcctccctttggtcctggggcagacacccttcacccttccagcagggacctccaaactacaacagttgtgcccatctctgcttccactatgccctgcctgccactaaggagttgctgagtgctgtacatatagcagggccagatttattcagatgtgcagagaaactgaggtttctttacttcctatgtatgacctgaccttcatgagctcaccctgctgggtgatggggcagtttgtgtgtgtgtttgtgtgtgtatgtatgtadgtatgtatgtatgtatgtatgtatgtatgtaagggagagtgtattagtctgttctcatgctgctaataaatatatagctgacactgggtaatttataaagaaaaagaggtttaatggactcacagttccacatggctggggaggcctcacaatcatggcagaaggcaaaagaggagcaaagacatgtcttacatggcagcaggcaagagagcatgtgcaggggaactgctctttataaaatcatcggtgttcatgasacttattcactgtcacgagaacagcacgggaaaaccagcccccatgagtcaattacctcttgcgaggtccctcccttgacatgtggggattatgggagctacaattcaaggtgagattgggtggggacacagccaaaccatatcagagagacagagtgagagagagagagagagagagagagagagagaaaagagagaaactaataataatccaattcatgaaaccacccaatctagcaatttaaacattctttttaggtaactcacttaaaaaaatgtaaatgcttagactttgagatttctttattctgctcgctgttactctccaagacagcagggtcttgtattgtcctctggttcctcttgactccatggtgatatctcttgtctgcttggtcacaggaagtcttagtgrcatctctagctaatgtctgggactgcctttctccccaccagcttgtccctgttcagctcctcctggcactatggatccagctgaggtctggctgtagcacctatttgatccctgaccctctgtccctcatccatggcagtgcccctaataatccctccagtcagcactatcagctgcttcctgtccctttgcagggcacaggggacctctgaaatcttcctccttcctgcctaggagctgaggaagatgcaggtggtctgaactgtggccttcctctatctcagatgcagctgtttttaatctgatgtaaccatcttgggtttgtgtaagggtgtcctgggagtcaccttggaggtcatctctttactgagtttaagaaaaggaaatggggctaaattccccagctatccattctctccttgccctgtctaacaatctcttgcctcaggactttgccccagaactctgatgtacttcatagacaccactttcctgagattcctctttccactgctccctgggggttctcgtggtgggaatggctgttggcagggggtatgggggaaatataaacacaacatactcttctctgtcacacatcagtgcattcaagtggtaaaaatctctgcactaggcggaactagggttttaggtgacagaagtcaaaatggtagatcacccaggccacaggttttagcttttcacctctgattccaatggaatttcttttctgagaaatatgtgaatgtgggggctgagagagaaagaaggaatctgcacctggtccacagcaagtaatagcaaatagcccagagccaaaagtcacacacagacatggcttggtgcagatggttcatggagccatatgtgtgattatgaattttaaagaccagcctcacttccagcaaatatgcttattttgttctatttacactagggctggaccaagttcagccatttttcagacttcatgggaagacccataattaggtgtcacagctgtctgagcttgcctttggctctgtcaggctgtggacagggcagatgcccctctcctgtgaccccagagcacggagcatcacctggtatggagaaaagaagactccctctcaagaaacactcgatcgatagcgtagctgtgaacaccacctctggagctttaaaaattctcacgtacactttgagagagtcagtagcaaatgttgaacattctatgattcccttgttgtctctttttactttaagagagaatcatttaaaggaattgtttcttcctctttccagtccccaagtcagagtctaaagctcaataaagctcattggaaaagaattcttctttttacacacaatgatagaatatattatgacaccatgtaggttcaaatatcatttaaaacaaatcttacaaagtatgttcccagatttaagaggttttagaaatgctaagcgaggaagtcctggtacagtggaggctcatgctgttcttgagggacaaactccaaagcactagataatacttttaaaatgaacagattaccaccgtgaacaatgaggggttgtttggggcaagtggagtgctttgtccagattgattcaacagtgtttgtggctattactgctaattcttctgtaaatcaactctccttgtaaattgtgatagaaatagctaacagaggaggatttttttttctaaatagctatgggagttggtcctgtattagcgtttaccttgtgtcactacctgagcgatatcaagctcatatttttaaccacagagaaagccagagctattttaatagaactaaaagtgaaaggagtcccattcttcatctacaaagaaagggaggtggtgctggcaagtgagatgggactgcataagtaagtcttcccaattcttcttttctttttctattaaatatagcacaaaatgaaaaagctttaggcttttgacacgttcagttattagaatatactggagctgaccacaaacgacaatgaattactggttcagatccctccccttatcccaccccaaagctattacaaaatgatgtatagttggaaggaaattgaatggtaattacattgaatacaaacttgaaatgttaataatatgcaaattgttttcctacttattggaaatgactatacaacaaaacaccgtctccgtgacctgtgttttcacaccccaacttgtctaccctcactccctcactcccttagtccatagctagctstagatttcattcctttcatttttttatggaatcgactcttatttatttttaaaatttacttttattataagctgacaataattgtatatatttatggggtacaatgtgatgtttcaatacctatatagattgtggagtgattaaatcaatctaattaacataacaattacctcacatacttctcattttttatggtgagaacatttaaaatctacccttttagcaattttgaaatacataatatattattcttcactatagtcaccatgctgtgcaacagattaccagaacttattccttctgtgtaactggaactttgtaccctttgattaacatctctcctttccctgttcactccctagaggacattatgctaagtgaaataagccagacacagaaagacaaataccacatgttctcatattcaggatctaaaaaaaaatcaaacttttagaagcagaacatagaatggtggttactagaggttgggtgtgggtgtgtatattaatttcattctttacaaccccttcatggccagcctgccatagtgaagccaccctcaaattgaaacaaacttctgagaatgaactgaaaaaggagagggaagatgcaaatcgtgcttcatatcttagagtcccaggggatcactgccagtagaggtgtaattagtgagcctttagtaaagtcactgggattctttttctctcaccgttttagtgtggtgaccatttgctagcatctgagtttcttcagttgatcctgagaacctccatttgtctttcccagggtttcctcaaggcatgagtctggttctcaccaagctccaagcatcactgattatagccctcactggatgctctccaaagtcatcagacacagttagtagctcactggtgaacatttacccctaactctcttactgctgctgaggccaagccgaaggatctggaggacactaagtagaccactatttaagaacagagagacacttataaaaccagctggggaaaggacaactatgtccagccttttgtcatcaatattccattgagctggataactgtgtcccactttttaaaactaaatgtttaattttgagataattgtagagtcacattattgtaagaaataatacagaggaattcccatgtaccctttacccattttcttccaatggaaacattttgaaaaactacaggacaatttcacaacccaagatactgatattagcataatctaccaatcttattcagagccctccagttttattgtactcacgtgtgtgtgtgtgtgtgtgtgtgtgtgtgtgtatgaatgcatttggttctgtgcaacataattgcaagtgtaggtttgtacaaccaccaccacagtcaaggtatagaatagttcaccagtaggttccctttgttgcccttcttacacgtgtctccctcttcctctcccttctctccaatccctgtaaacccctaatcttgtcctccattttaagaatattacataaatggaatcatatagtatataaccttttgggattggctttcttcactcaacataattcccatgagaactgtctcatttttgtcaaaatgcttgggagattatctgataattaggatgattacgtttcttagttttaaaggattttaaagttagaaagtatctttaatatacaacattccatttgactctttcaaaggagcagaaagtaaaggtttaaaggaaaaaacaagtattggtgataggattgcattttctaggtggggcagagattggctggatctccactaaaaccaccacctcttcctcttgagcctaccacaggactgtgttttccagcttctctcttggaaagacgtrgttaggtgactatggcttctggacaattggaagtgaccaggagcaatcagttccagttccagtctggttcataaaaacctctcgcacatgtccttttgcatcccttttccttctgtgacaatcttggaaacccatggtgaacttagaggagccacaaggtgggacagacaacccctatttagctctccaggatttcttgacatttagagttctgagtcacaggaggtgtgggagcagctactgtgcgcctggaggaagtggagtggagggaaacaatagcagactccaacagttcctttcccatcatttcctccccagtgtggtggggctgcctcctgtcccagaccaagaagatgcactgtcttcacacacacattcaaagcggcagcctcaggtcaccttagaggtttctcacggttttctttgaggtttttttcctataatttttcttgagttaatcttaagaaagggaactgtgccaattcagcatcttgttagccattatttgaaggtttttaatctatgaattaatttatttatttctgttattataaaagaaaaaagaagtagaaatgagaaaaatgtaaccttaggtttatcttaccaaaacttatatttgtagtatggtagaattcctgtgattttgctggctgagggagctttagctcctctggataatcataccaacatgatgcaattgaggttgaatgaggaactaaattcagaaaaggaaagcaaaggagtcacgggaccgggttgactatgaagacatggaaagatgtgtcttgacgtgtctaggcatgggttgcaaccttcctaaatcttcctgcaaacttgcttctcatttctgctcagcttcctgttctcattagtgccattcaaagatgtttttagttcttctcatttctttggtctattaagacagatgttgaagtggcatgtttatcagcaggcagaagtgacagtgattctttccacatgaatagctgcaaatgaacactggcttctggaacttacctcttggtagtctgtcaggatcttaactgcttccctctccccagtccccagcatggcctggggtggattctgaatgatgctctgggttgtatttttcattcttttttatttcttcacccagaagaacaagtgggttttcataataacatcctttcccaataaggtctgctcgcctacaaactttggagagagaatgtttaccttcacgaaagattttcttagcataatttggaatcttactctaaaaaaaaatccgctatgtccttttaacaaaatgtgtgagttgattggcaataaaaacaggggataaactggtttttaagaaacacttatttataaggccaagaatgactgttagggagctcctttctaaagtactgcatttgataagaagtgcaaaggaacaaagtcaatattattgctcaaaatggattaaaactttaaccctgagtcgtaacaccttctagagtaccataagaatagaaggcttcttttggacttgacagtgcattttggctggtgttcccatgcagtgagctgacacactcactttggacacacagttgcccacatactctcacacccacaaacatatatccccaaaggagattcactctgtagagcagaacaaggaggagactgagcatgcagggctcctctgtggcatagcttcacgaaaaccaaaggaatggaaatattcatcagaaaatccatggcaaccaagacagagtatgcagtgatgcccttgactgggtatccaaagagtgggtccctgcatgtggaatggaacaatcacatgtagaataggatagttcaaaaacaacttacattgcctgttttcttttttcttgtagcatgttttcttgtccacttatgttgtgcttatatgaatataaaaatacatatgcacatcctcacacataccagctggatgttgaaaggaagagagttggaayagtgaagtggtagagggacatgggaccagaattaaatgctttataataagtcttgatatgtaggatagtaacaacagttttgttgttttaccacatcaactatatttcattcttcacatttctaagtaaattttagaatcggtttccaccaaatgacttgtggtgaatttgtttgtaatttaatctacaggtgaatttagggagaattcatatttctaaatgttgagtgttaaaattcatgagcatggattcttcttccattatttaggtcatttaaacttctctcaataatatcttaccattttccatgtagatgattttatatattttgtaagatttattcctagaaactgtttcgttttgatgtttctgtgaatggtaccattttctaattgtttattgctgtttatcaagtggcattgctaaattcacctcttaattagaataacttatttgctgctttttaaagatattatttttttccagtcctatgtctattatttcttctttctttgttgaactggtgaagacttcccatacaatattcagtagatcaattactctgatacaattctgtatcattattctgatacagaattattaatagtttacctttttcttatgtcaattttgataaattaatattttatggaattttaaaatttcatctaaatttttaaatgtatcttcagaaaggaatttatgatatccttttacctttctaaatgtccacagaatctgtagtaatagtctctttttatccttgatattggttatttatatcatttctcttttttcttgatcagtcttgcttgacctatccattttattaagcatttcaaagacccaggttttggctttgctaattatttctgctgtgagtttgttgctacttaagttttggttttgtgcttattttttgctattgcctactgtctttggagtaacttgttcttctaacttcttgaggtgcataacgagatcacttatttttagacttctccttttctttttttttttttttttttttttttgagactgagtctcgctctgtcacccaggctggagtgcagtggcacaatctcggctcactgcaagctctgcctcccaggttcacaccattctcctacctcagcctcccaagtagctgggactacaggcacctgccaccacactcggctaattttttttgtatttttagtagagacagggtttcaccatgttagccagtatgatctcctgacctcgtgatccacctgccttggcctcccaaagtgctgggattacaggctagacttctccttttctaatatatttatttaaggctgcacattttcctctaaacactgctttagctgcatactacaaggctgtatgttattgttcagttagaattattttgtgatttaacctttgacctatgggttatttagaaatctatttctaaatttccatacacttgaaatatttctagccattttttgttttgggttctaatcaataacaaaattgtgtttcattgttgtcacagaacattatctgtctgagttcaattacttgaaatttattgagagtctctgtgaccctgcacatggtcagttttgattactattacatgtacacttgaaaagaatggtgcattctgcagcaatttagtgcagtgtccggtccatgccaactaggtcaattttgttcatgacgttattcaaaatcttctataacattactaatttttttttagttaacaagttatgtagtgaggcatataaaagtatagaaacataagtatgcacctaggtactaattatttttcttaagtgaaaaagtaactggagtccagtaatttatttcaatccatgtgtgcatctgctttaagcagatgtaattagaaactgtagaagtaaaattctcttttatttatagcattaacaaaaggtaaaagctacataagtaggctattcttgccagtcataatttttgttggcactgttcttgtttttggtttgatgttcactcaatgaggaaaccgcatgccccaaaacaatgtctttcccagaaattcttaaaagcaaccatccatactaccactaaactcacgcatcactctatcaaatttccatcatgtgagagagagtattcacactgtgctgttcagagtatcagaccagcctgattacaatggaaacatagaattttccatctcactcactatgtgtgctcctctactcagctgctagattgatctttctaaaatgccaatctcatcattctgttcctccattttaacattctccaggggttccccattatctccaggagaaaattacatttctttagcttgagattctaagtctactgtggtgtagttcctaccttcttctgttttatcttttgacacgcccctgaatagatccgaatagatctattctgaaaagatccgaaaagatctattctgaaaagatccgaaaagatctattctgaaaagatccgaaaagatctattctgaatagatctgaatagatcactgccttcagtctgctctctccatgcagagtctgccgtttccctatcccatcctctgtgcctggctgacccctacgtggccttcaaaatggctctggtcaactccactggggagggctttgttattagaagattcctctcctctgtgctttcttagcccccatcacacctctgccatttcgcttacagtactgcattgtgggtgctggttagctttctgtcttccctacctgagagaaggcactgcatttccccactttgtattcctagagcctatctctcccagtgcctgcacacaaaagacacccaatgttgaatgtttttcaagtgtggccatcttaatcagctgtcattaattatagaaacaaacaatggccagaaaaatgcttgggtgacatcattggatggcattaaagcataagactaaaagtcatgttggggcatcccatttggaagagttgttttaagttatttcctatggcatttaggtaagtggcagaggacaggagtgacatggaggaggcaggtgtatgaaaaggacacagagatgagtatgcygttcgaatacatgggtgtgatgaactgaaatgaagtttttttaattcaaatgagtttttagggctcatgatccattgggacatgtagagaaagtactgtaaaagatccagttctctctcatatcctttcaaacaaaacaaagcctttctgagacagcagtacttgttggttacactggcattttaggagctgcccccccatcctcagagggaataaccttgggcagaatagacaaacatgagaaagtatgtttccatagcttctttttatagttcatttttatttgtgcaaaagaatgaaattctagtagggtctaaygctcaacaaatgtatatgttttcaaggcatagggttatagggctttctgcgacctcactggggtggggaataatgcctagtccagtataaggcagttttctaaattataaagttgaaccaataagttgctttttaatgaagctcactccattggtcctaggaattatctttgtggaaaaaaaagaaatatctctcctccctaacatccttttaaattacaaaatacagtgctctggcctttcctcacatagttcccctcttccaacacctttgtgcatcccacatgttgattggtgtggggtcaggggaagtcagcatccagggctcgctctggatctgagggcacagggaactgaagagattcagtatctcatcatatgccttgcaggtaagaagcatacagaaagcaaacagtttacgccaagaaatgcaagagtcatgaaaagatgcaatggctcatccacaatgaaattgcacactgtcttaactgaaaggcatcttgccaaagttggaaggcataagcacttcctaaaatggtgttgcacttctatactggaactattatctggcagctgcagtgacagaaatggatggagtgctggaaactatgaacattcattctctcagaagagaaatcttattaatattattattatttgtatattttcctacttctttatcttccttccttgtaaatttatttcaaatgctcatgaaataaattccccttaggtgtccagaccaaaaattcccctgggtagtattaaaacaccagatctccatctttcccaaaatataggctgcagcataccatgggacctggcctctgaggacatttgccttttagatggaatggattcacatgaaaagcatctagacaactttactaggaaaacaaagaagagcagttgagccctctggcctcagctagtcttttccagttgaacaaaaatactttatgacatgggtatgaaagatcctggctaattttcagacaacccttcttaagatagattaagatctaaggaataccttcactataatgacaaatagagaggggtccttattctcatgaacttaaattggccaatgataaaagagctaatttgaaactcttttgcccaaagaatagccatttcaccaagaggtaggtaggatatggcagggcagggctggatattccaaatggaatggataaagagctagagaaaggtgggctgaggggcctatggagcataagcacctgaacactatgctaaagctcaacagaatttgaaaggggcatctggaatcactaggctttgtgtggcagctacataaagcagaaagttggcagctgcagcttgtatctgacatgggtgacacccaarcaggagatgggtatatacaaagctggtcaccacttaactctttttaacaataagttcttgtagtctttctattgtcatgtttttttctttttaaagaaacttcttattgtgttgatttgggcttttacctttgtttcagagatctatgggttttttttgaattgtattgaacacacagcagatgctccctaaaattcacttctgtttccattagtgattttttttttcaaaagtgaatcctttcacattttgaatgctgtattttcttctgtctttattgctgcatctcttcatgaattttttttctgtttcatcatccttgagtaaagaaaggtgaatgtcagctgggtgttcttccataaacagagtgacgggttgttctaggttccctcactgtctgccaggaagttgattgaatcttctgctcatctcataagctggaaagacagggttacatataaatttctagtgcctcccacgcatccaaaaggtgcattatttctgtgtcatttcctctctggatctgttgaaaccacttggctagggttttgctttctatttacagcttcctgttgggtcagaacttcacactgaatgcataaatgtgactgcctaatgtctgcctggcaccactggtgactacatcagggagaagcctctgaatggctgattttctgctaattgtggcacaaagcctgggtctccctgatggagccgatttcagtgctactcattggaacagctgagtgagattctaagtgaagctttccctgaaggccccactcctcttctggccctggggtcccagccccctgatcacaaggtgatatgaggccccttcatgacttgattctctcaatactgtgctttcccaggagtgggaattgttaaaaattagtggctatacatccatagtccatataatgtccttaataattccaattatttttcaactgatgagaattagcttttagtttgtaaaagtgggagaggaagtgtttgtatgagaaataggagattgtcctagtaaaaggagacrtgtcagctcattttcatgtttagttgtccttgtattatcagcattttattttatctgtctcttctttccagaatctttttaaattacttgtccatttggtacagtttgagttagttaaatctaggtcatgaatcaacaatccatttaactggagactcacgaattcactcccttggaagaccactgygcttaaagtttttgtttttgttttgttttctggaaaggatatgaatgataaattttgaagttgttgacacctgagaatgtatttattggcttcttatgtacttggtaactctgtagatgtagatataaatgtcttgaagtttcccatattattctcaaaaattggtactgttattaaattgctttttgatgtttgacatgatagaagtagatggccaggacaattttttgttactttgtaagtattatatttcattttctcaaagattttcaagtttgtttctttattctttgaaatcaaaaattacagtagcatacatttgatgttttcatttacttttaaaaaattgtatttgatcccttttcatctgcttatacaggttttactttagcctaggaaaacttattcaattaaagctgcttctgttgtttatttcctagggaagttctattataggtagataggatcttctggcttttacttctattactcttataatttttctcatcattttcttggtttttgtcatttcctcttaggttctagaattgagatggattctactagagttacatgtcagttcctgatagaacctgtaagccccaaatggagagaggcatttttaagaagtttaattttactcttatgtttgagagtaaactttaaaaagtctaattttactttcatttttgagactaaactttgaaaagtttaattttactctcattttttcgtttgggagtccaaacagcctaggggrtagctgggcaccttgaggtgagaatcagaactggaggcagacttagccaggaatgtgttttgctaaagagcttccaatccttatttggagcagcagtcagagctccctgctgctgtctccccattctttggcaggctggctatccttctgtgtgagtgactggcatgcccttccctgccaactccctgtctcgtgctgcctctgaaattcagaactcttcccagtgctgctaatggcattgccaaggctgaccttcacctccaagcctgcaggggcctctgctgatttcctttgcatatttccgtttgatatattgcagattcgtaattcaggtagatactacctgaatctaatgttatttgtattttatatcattgaaactcctggaaattwttttatggttgaccctcttgcttactttttaaggttgatccaagattttttctcattctttattgtgggtcattttcatgcaaatcaggaagggagtagtctataccttgccatgaaggcaacctatttgaggatattttgatgtcaggaaggtgagaacagattgcgtataccaacgggaagtggagatttgacaatcattttaaatatcttgctagaatttttctcatttggttatctgtggtgatcaaagtcattgaataatgacaatagctataacgattgccttttcaaagaacaaccgagtcacatactctatatcaatttcatttaatctttaggtcaactttagaaatttcatactttgctcttcattaagataacactcaaagatgttacataacttacctagggttgcacagctaataagttatgaagtgagcttcaaaccccagttcgtcttcaaagtctctactcttttcattgctggttatcaaacagcctgaagagttgcccaatctccaaatctctgtggtatttacagtattctcagttaccgcatgttgatcatctgtagtcattttattgttctcatgaatactaagtcctctgtgcagataatgttcatataaataacagaaaaaacatgttttattgcttctcttgtatagtctggaattcctcggtttaaaatcaatcctcatattttcttttcttttttaactagggtatttatctcctctcagagtgattttttctgtccagtaaaacaatttactttcatctattccttctgtagccctcttgtggttctcagtggtttatatgttttcatctgtcttgggacatgcctgggtcatggggctgccattatctggggccactgctggaccaagtgccttcaacagagcagaatctcaagaggtatttggtgattttgctgctggtcaggctttactacatccacatagaacaaaaaagatgaaaatttgagaaaaagcaaaatcattgataatttaggattcataaagataaaagctagctagaaagtatggtcagtgcctggttggagagaaattttttcttcttacttcacaatggcaaaaatgtatacatttattttattacctgctcctttggtcccataattattttcctttcagatgtatcagaayaagtgagaatattcratgactgtaaaatgtatcaccatagttgtaggattattctttgtttcctctattctaatgaaattatgtctttttatttttctagattacggtctttggtcaaacaattagagagaggggaagcttcagtggtagatcttaagaagaatttggaatatgcagcyacagtgcttgaatctgtgtatattgatgaaacaaggtaagctaaaaataacaaaagagattagtatagtgatagtaaattttctcttaaatggcttttctgaaattgtcccccatgccaggaatggggtgacattcaaattactcatctttgagttttagtttccacaaacaaagaggatagatttggacaagtcacttactctctgtaccgcctcatctataaaaggagctaatagaacaaatctcatatggccgccatgacaaggaagtgagatcatgaaagaggagaaaaacgaatttttaaaaatccactaagattttaaaaatcagatatagagctccattgtaattattgtatgttkttagtgttagtctaaaaattgagtttatgttttaattcataatgtccattagtaaatggaggctcctgaagtgatcgagaagcatgtgttctcttaagcacccagcattccctcttcagtcttacgtrtgtcgctgatttacttagcaggtttattccacttgaattatctaaacgtattaaagcggtttcagttactacatacgtttgaaagttataaaattgcatttcttttgaaaaatgttgaaatgttgaatacgaaaggtgtggttttttttycccctaatttagacaggcttctctgtcagtatttgtgatgtcttttatttgccaaattccaatctgaaagtatttcacagtaatctaagatttgtatggtttactattattattattttgctgacacacttggtttctaatttaaggaaattcgatatcatagcttttttccaaatgttatgtttcctccgcttacctccaccccaattggtaagtctaaaggaaaaaaaaaatccaaacacctttacattggcagctacttttactgatgatttttagttgggtttactgtaaatatgacatgctattttaggttttattttaacattgctctttgtgttcgattctagtggtctgacctatgaacaagtttgaaaaatcagcaaaacacagctattagatgattaaatcattgtgcgcaaataaagaactgcattattttgaaaattttccttgaatttagacatttaaattttggtagcaacctggaaagaatcttaattgtcatcacttaggatcactacttcagaggactgggttgctgtgatttggtaaatactttgcaaagtctcttaagtatccatttatatttttaaacaaaataacgtcacatggtccatctatgaaataatacaaggctccctgtgaaggcatttttaaatagaaggtttaaatttcactcaaatgccacagagtgcttctgggtacaatggaccagttcctttgtccagtctggtagagagaaccatcctgaaatatcagtggaagccaagaccatcgcgaaacacacatggcgagcttacataagccttaccaaaaaggcactgtattttttgnggccaatttaatttggtttctttgcacctaacatgcangtgaggcagagaggagcagctgctttgaacagagagctccaacttcagatttaatctcagtgtgctgattctgtttcttgtgttcaggagactcctggatacagaggatgagctcagtgacattcagtcagatgctgtgccttctgaggtccgagactggctggcctccaccttcacgcggcagatgggkatgatgctcaggaggagcgacgagaagccccggttcaagagcatcgttcacgcagtgcaggctgggatatttgtggagaggtaaagatgtcattcattgtcatttagtgactaaagcagccaaagcaacayrtttccaataactggaagctttgctttaatgtagttttcctatctttataaatactgaaaattgtgggtagaaacagatagtcttgaatgagaaatggcaaaaacatatctattttaatctctgtagcatcattaggaaaagcttttgcttttgctcagaatttttttgtttaccagagaagatttagtttgagttcagtctctaatttttaaagcaggaaatcatctcatctatcatcttttgaaataggtggatgatgtctccatttgaaacagatctgggatgctttgaggttgctggcccagggaagacagttcatttcagtggtttgaagtccccaagacacttcagttttattagctattttactctttgaaatcaaattgacctccttacccagcaatagattccagaaatagatatattcttcctataatccttatagtgtaattatacattttagaaacaccacggtaagtttaaagattacctgggacatttttccttcttgtttttgacagttctaaagaacaagctattctaaatgggttacccataggagttcttcattcaggctaaattactactctgcttactgtctattctgtactataattcactctggcrgaagaagtgacccatttaataattcaatttccagtctggggcctatagagttaggttttttttcccccatggttcatatgtttgrgattgctttaatttcttttgaatttaacacttagaccacctgagtgaatattaaaaatgtcaaaaaatgaattttaggttctttggatcaccccacttgacttcttattatttgtcaatacttggtatgagtctgtggattacaaatcctactttataagatatcatrttgcatttttcccttttggcttttcagaatgtatagacggacatcaaacatggttggactgagctatccaccagctgttattgaggcattaaaggtaatacgagtgaaaagattttacaatgtacatggtacctaataaaaagtagagttaaatttgttagaaaataagaggctttcatttacagttacttttccagttattcctgactttattctttcattatctttttattatttgttctaacagtatcactgtcttttcacccttcatcttcccaatttaaaaacaatcaaactctgtgtgggtttcatttctttctagtactctagagtagtttagattttatacagtgatctgtcattatgagagttatctgattttgccatacgagatcaaatatgttatggctgtaagtattcagcattaggaggatcttcagtatttgcaattgtcccattatctgattacctactccaagtccattttatagatgaagaaaccgagactcagcaagatttaaaaaaaaagagttaattagagacagagctaatgtttgatatcagagttttcagcacatggtaagctcttagtaatgttttactgcatgaacgtatggcctgagagcctttgtcccatctatatagcccattgttttccaaagactctcactgagccaaatgttcccatggaagtcatacaaatgcttgagtttaaatgggctaaatcctgcagaattacctctagtcaggcaagttcttggaattgtatagaatatctccagcagccccaaagcagatgcattcctgaaggcattggtctgagggtatttgagatttgctaaacttgatttggcttctggattccaatgtgttgctgatcctgtagcccaagatcactgagtttgttgacatcacatgttgtctatgtatggacttgggccatgtgcttagggacattgtagcattttgacctttgctaaagccattgttttctttctccaaaacctgaaaaaggtgatattttcagaagctaaattacctattcatggagttagggggtggggagtgcttcttgattaatttaatgtcaagaaagagccccttgggacaatcttgattatgtattcataggcctttctcttgtctcagagacatttactagctgaatttgagagaccatatatacacagattctcatttctcctttgtttgtctctaccctttccgtctcttcttacctaatcttaaaagcaggaaggatactcaggaaggacccagcaagaagatgtatcttttctcccattcctctttaacccctaatctgatgcccaatacttcagtgtaatgtacagtgatatttcccattttaatcagtgaaatcacttcaggaaatctgatatttcttaacatccactatgaagttgtattaattttcataattgaacctgaatgttcaatcaaactcttagaaacattaaaagcatcattattgtctttaattttttcctttatcgggaacataaatacaagagggtatactggtaccaagacatttacgaaaatgtttcttccaaattgaagcctcttttctatccaaattgaagcctcttttctatgcagaataactgagaaagaattggaacaaactgtgatgtgcatgaattgttattttatacttagagaaaagaaaatctcagatgcacacatgttgtctgaggggacaggtacttagattattcagataaggaagacctactagctctctaaataaattgctacttctcctcacatatattgttgatatgtgcattaaagctgaagctgctatttctcttggctatgtcccctgtttactggggaagttcaaagctttttacaatgtaatgttttttccacttctccagaggctgattttgtttgcaatgagttggagcgatcacagatatagactcttttgtttctttctttatgtactacatgttagaaaaaagattatttccacttcattgccagaagttcatatggaatcattactgctttcttttattacagaaattttccctaaagactgagagaatacaattccctaaaataacccttatgctactgtcatgttaacctttgtggttaacgtaagaacatgacataaaatgatatttaagtaagatagtaatgaatcagtctctaaatttgaaacatgttgcattatgttattttactttttccattatatatatatatatatatatatatatatatatatatatatagatgtaagcttctaacttgaggtgttctacctcttgtcttctgagattagcctaatggaaatgtagctgtgtgctcttctttagaagggcatctgttttgtgactcaggaagtgacaccttggaaagactccaggcttaaagtgggaggagatgaggaggttcacgcttcctttgtgttagactaacaggaagttcctgcaatttctctacaggaagtgtccttgggcaaaatttggtgaatgaggaagaatggttgaaggcagttaaactgggtacttgttaaaaatgcggattccaggccccacagcaggattctctggagtccccactggagggtccatattttggccaagcccctcaactggttctgaagaacattagactgagaattacagctaagccttccctaacatgagggaccaaagaggacatccgtctcactgtctctatttgctcatcctctttgttctctaagtcctgatattcagaataaatcttggctttttatcatgataatctctttatttctagtgatagagagccctttcctttctggacactaggattaaaaattgtcagaagtgacacagcattttccagcctactcagttgtcagtgactttttccttaggactaaagataagacaatgtatgtgactcatggcagtgccaatgatagtaaccaaggtaaagctttaggtcttaggttaatcttaagtgtccttgctgtctatagcctgcgccctagtgggatattaaagggatgaggcctgggtcacagcacatattcatggcatttacaatttcatctgttggcagtgagatcattaagggtcattggtgaggttattacctggctctgctaccttatggcactagacatttcaattaatctctctgaggttgccatctataaaastggagaaagtaacacctatctctagacttgcgaggttttgcaaatgcgtgtaaacactcacactgtgcctagcacagaaaatgtgctcacagaaatgtgcctgtcactatttctttggttattttaatggaggggcagttattgaagacttaagtgaggttaccactaagtgtgaattggaacaattcaatttaaacccctctggaaaagtctgattttcctatatgcaattctattttccctgaaaacagtttattagcatccaggagggagacccttgatggccttgggatgaatttgacagttggaatgtttggtcaggaacaaaattaggatggatggattatgttggaattcagtgagggctggggtgagagtcactcatgagaaccaaggtctctgccagtgtaccatctgacaccttgcctgtaggcagtgtggtctcatgtgaatccttgctgtcaagctcaagtgaatatgcttcacctaaccacgggaagtgagattttggtgctgtgaaaagccaaatgactgttgctttaaccattgcttaaataaatctttgtttactacatccacaagaagttggttatgataagccaaagctcaacagactgtatttacatatattttggagtagctatttacaggcaaagactttkaacttcagggatggtatataaggtgtgtgttcagtttagtttttccttttactttttttcagtaaagtgactaacagatttgaggacaagatcccagactagtgactccagaaatggtagcatttttctgtcatatgaaatgaatgctttctttttggtttcagctcagcagtttcgattgatgtggcatattgttttgtgttctacatcatgcatgtttctgaacacttctaaatgagttaacattcttaactgtaaacttagaggaagtcattggatagtgtcaagggattgcagagaagttcagagaagagaagcatcgtaggctgtagtgaattaaacagtagcagctgcagggcttaatggaaagcaactgatcttaggcatccaacctatgtttgtgttctggccctgcctgtatctctagcacttacgcaccttgggtgttagggaaattaggtaatttatcagttttcttatccataaaatgcgactaatatctatcacttagagttgttttcaggataatttacatatttatcaccaaccataatgcctgtcatacagtaggtactcaataaattatggctatttgtattagtaataagactatttaatttttttaacagtagatactatgtagactagccagattggaaaaagtttgagagtggaaagtctgtttgagtgtcacactgtgaaatctccagtgagggctgcaggcggacttgaaagtgaggagactggtaggtgtgtaagtgtctgtgggctaatgtgttctttctccccaccctgtcctgcaggatgtggacaagtggtcctttgacgtcttttccctcaatgaggccagtggggatcatgcactgaaatttattttctatgaactactcacacgttatgatctgatcagccgtttcaaggtcagtacctctttaaaaagaaaaaataaataaactacatgcatatgtttatcctcatatgacttttgggttcagactattttaatatgcggaatgaaaactgctccaggcnactgaggaagcatccttcggatagccactgctgtgaattcctctgtggagggtgattttgattgcgcccttgctggtgggtctcagcggcatgggagagacaggagagacccatttagattctggtcttcctggaagtacaacccaaagcctgtaataaccaagctccctttcaggctctgcccaaaggtctcatttccacatgactttgtgtcctattgaccaacgctgtcagaggggcagtagtggagacagagtgaacatctgctgtctctgtaaacttttttttttcccaccacttggctcattcagacaaatactatcacttatcatctgtgacaggtcattggtattttccagccattcatgcttcaaattgattcttcaactttacataaagaacttgaatcrtttccagtgttcaactccctacagccttctaatactgtagactctcgaggtggggtcagatcctcagggagttgatgtagtcatctgccaacatctatggtatcaagctcctctgacttccctcatcaaagggatgagcctctggaaaacacaagtctttttctgtaccacatattgatttctccggagatgtggttctttattttctcctagggactgtgtatttggagaggtatctgttttttaattggtacaaatattgtatatatttatagggtacrtgtgatattttgttacacgcatagactatgtaatgatcaagtcagggtttttggggtgtccattacccgcattatttatcatttctatgtgttgggaacatttcaagtcctctcttctagctattttgaaatgcacaatacattcttgttaactgtagtcaccctattctgctactgaacattagactttaatccttctatctaactgtatgttcgtacccattaaccaatccctctttatcaccaaccccctatacccccacacacatcccagcctccagtatctatcattctactctctgactgcataagatcaaattttagctctcacatgtgagtgagaacatgtgctgtttgtctttccatgcttggattatttcacttaatgtaataacttccaattctatccatgttgctgcaaatgacatgatttcattcttttttatggccgaatagtattccattatggttgtataccaagttttccttatccattcatccactggtggacacttagcttgattctatatcttagctattgtgaatagtactgcaataaaaatgagggtgcagatatctctttgatacactgatttctttctttctttctttcttttttaataaatacccagtagtgagattgctggattgcatggtagttctacttttagaattttttttttgagaaatccgcacactgttttccatagtgactgtaccaatttacattcccaccaacgttgtagaagtgttcccttttctctacatcctcaccagtgcatcttttttttttttttaaccataacagccattcttactggggtaagatgatatctcattttgcttttgattttcatttccctgatgattagtgataatgagcatttttttcatgtacccattgtccattatatgtcttcatttgagaaatgtctatatctttgcccactttttaatgggattatttgttatttttaccaagttgtttgagtttcctgtacattttgggtattagtcccttgtcagatgaatattttgcagatatttctcctgtttaacaggttgtctctttactctgttgattgtttcctgtgcagaagatttttagtttaatatagtcccatttgtctatttttgtttttattgcctgtgtttttgaggtgttagccataaaatctttgcctagaccaatttcctgaagtgttttattctcttgtagttttatagttttgagtattatgtttaagtccgtaatagattttgagttgatttttgtatatgatgagagatggatgtctagttttattcttctatatatggatattcaattttcccagagttatttcttgaagaaggggtcctttctgtaagtttttggtgcctttgtcaaaaatcagttagctgcaaatacgtggatttatttatgggtttcttattctattccattggactgtgtgtctgtttttatactaataccagaaaatactattttttatactaatagtataaaaatatactattagtataaaagtatactaaaaatactattttatactaataccataaaatactattttatactaataccataaaataatatatagtgttttggttactatagccttgtaacatattttgaatttatgtagtgtgatcaaggatagtggcctgtaattttgatttattgttgttgcatccttgtccagttttggtatcagggaaatgctggcaatgtaaaattagttagggagaaggagaaattgcccctcaattttttggaatagtttgaggagaactgatgttagtccttctttgaaagtttggaggaatttgatagtgaagccatctgrtcctagacttctctttttcaggagaatttgtattactrattcaaactcattactcattattggtctgtccaggttttcaatttcctcatgattcaattttggtaagttgtatgtgtccaggaacttatccatttcctctaagttttccagtttgttagtayatagttgttcataatagtctctgatgaccttttgtgtttctgtggtatcagttgtaatatctcccttttcacttctgatgttgtttatttggatcttctcttttttttcyttgttagtctagctagcaatttatttattttgtttgtcttttcaaaaaaacaacttttctcatttcattgctccattgcattgttttgttagtctctatttcatttaattctgctctgatcttcattatttygtttttttwctaatttcagtttggtttgatattgctttctttttcattgaggtacagtgttagattgtttatttggaatttttctactttttggatgtacacatttattgctaaaatttcccttttagcactgcttttgcagtattccatagcatttgatatgtttagattttcatttgccttaaaaatatttttattttctccttaatttctttcttaatccaatggtaaatcaggaacatgtttaatttccrtgtatttgttcagtttccaaatttcctcttgttattgatttctagttttattttactgtgatctgagaagacacttgatattattttgatttttaattttttgagacttattttgtgtcctaacatatggtctaggctggaaaatgttctttgtgttggtgagaaaaatttgtgttctgtagctgttggataaaatgttctgtaagtgtctattaggtccatttggtctaatgtgaagtttaaatccaactttgttgattttctgtatagatgttctgtttgatgctatgatagagtgctgaagtctcaaactattattgtattagagtctctctcttctttaggtctagtaatatttgctttatacatctgggtgcttcacttttgggtgtgtgtatgtttagaaatgttatatcctctggctgaattgattcctttttcattataccatgactttctttgtctctttttaccatttttgacttaaagtctgttttatctgatataagtatagctactcctgcttgcttttgatttccatttgcatggaatattttttatgtctttttcttttcagtctacatgtgtctttacaggtgaaaagagtttcttataggcgacatatagttgggtcatggatttatttttaatccatttagctagtctattttttragtgggaagtttaattgatgtacattcaaggttgctattgatatgtgaggacttattccagtcattttattaattaatttcagattgtgttgtatgtcctttcttacattcttattatttataattgtggtttggtggttttctgtagtggtaacatttgggtcttttctcttcctcatttgtgtatttgctttaccagtgagttttttccttttgcattttcatgatggtagatgttgtttctytgtttccaggcgtaagactcccttaagcattcactgtaggtctggtcaagtaataaggaattccctctgcatttgcttgtgtgggaaaggctttatttctccttcattaatgaagcatacctttgctcaatatagcatccttggttggcttttttttttttcttttaggactttgactgtattatcccattatctttttgcctgtagggtttctaatgagatattttctgttcatctgatgaaggtttccttataagtgactacatgtttttctcttgctgtttttagaattttttgtctttgattttgacagtttggctctaatgtgctgtggagatctttttgaattgtatctgtttgggaatctttgagcttcctgtgtctgggtgtctaagtctattgctacgtttgggaatttttccactagtattttgttaaataggttttctgactcttttgtttcctctttgcttttggggaccctgaaaatgcaaatatttggttgtttaatggtggtccrttcgccacataggctttgtttattcttttttctttatttttgccagactgcattttttgtgaagacctgtcttctagttctgaacttttttcttcttgcttggtstagtctactgttgaaggtttcaaatgtattttgtatttcattaaatgaattcttccattccataatttctctttgctaatttgtatgatagctatctctttggtaaatttatcattaatatcctgaattgttttcttgatttctttgtattatttttatgtattctcttgtatatcactgagcttctttagaatcaataatttgaattatttatccaagacttcgtaaatttcattttgattggggtctcttgctgggtaattagtcaatcatttggaagtgtcatatttccttgctttataaatgtttattgtgtccttgtgtcaatatctttgcatcttgttaaacagtcacttatttccatttttaaaatttgctttcacatgggaagactttttcctgaagaagtatctatgatgttggttgagtagagaactttggctttaattctggctgtgtgtagtagtgcagtctttgtatgattcctttggctgtaaaccgtgtcagcagtgtacgtgatttcttcagtagcttagagtgtaattgttagtggaggctgtggtgaagtttcactggagatgggatgccagttgggcctgaccttgggccccagtagtggcagtggtgggccaagcatgcctgtcccatgccttgggccccagggagttctacacttgcactggtgttagcagatccaagaggcctgattcttgggcttccaggtggcttgctcaggagccagtggtggcagcagtgggccaagtggattgggggcttctcagtcccctgaacagtaggcatggcatgagcattggaagtagcagtggtgagactaacccctcagttccaagcatcatagaggtggctacaacaggctaggtgggccagtctccaggctcacaggtggcatgtataggtgggtgccagctgtgatggcagcatcagtttgagtgggcctgacctcaggtgcttgagatgagtactcagttcccaatagtagtggactggactgggctatcctcaggcccccagatggtgtgttgaggcactggaaggtgtggaactgggcctgttggatctgcagccctgctactgtggagggtattgttgctttcagtggcagcagctgtatacgggtggctggggagcatgcacttcacttgtgctttggtcatggctgcagcagccctccatggaagctgctgcaggtggggggttttgtccttagggtgcatgaacttgcatggtgggtttgttcctgggggcagtgcagtctttgctgatggttcatacttcatccctggaggcaacagccagccacagttgtggctgcaggcagagaatgtcaatggggctccagagttatggggatacaaggactattgagcccccaggtagtatgcagtctggtgggggctgggctctcaatatggtgccttgctgtagctgggtagggggttaggggatgtgtgggacccagcatgagctccctgtatggagcaatgtcttcatgtgatctccagacagctccctgtcttagtctcagggtctgccagggtttaggggctttctggtggctaggatacaggagtccaaggtgggaatgtggactgctagccatcactcacttacctttcttttcgctggagagatagcctctccaggattccagccaatccatgccttgattctctctccttccttgctttaggtgtttcctcttacttctctgttgaattctagtgttggataatctatttgaaatgtgattatctacttgctattttggttcttttttgtggaggaggtgagtgccagatgcctatagttagccatcttgaagcccctcccactgaggaaatatgtctttacatgaccacaaatacttmatggccatggtccttaggtccttaatttttctttgcatcggaaatctgtatgaaaatcttgtggatgctggagaggatgctggagactttccttggaacaaagttcctgtgcacacacacagccctttcagcgactcttagatctctgtgaaacaacccaaggagcccaggttcattggatctttatttttaaaaatggtaatgaattcatctctgacctcttaaaggttgtattttaatttttaaaattctgcaaatggtaaaatggaagaatatgaccaagggagaacagattatggaatctcaggagtattaacttagcattttccttatttttttttcacaaatgtaattgttaatcctcaggaagacatatcctctccttttcccctagccttatattgtataatttaccctgaaccatggaatggatccagaaaactaatacaatgaaagttttctggatgcccttattttgtatatgcattttgcaatgttcttcgctgttacatagaaaaggaaggcatgtatattatacatatttcagaygacaaaacaattaatctaattggaaatattctgagtgactggtagttgcaaataaagactgaagtattttattcgttgagaaataaatgaatacatactatgcagcatatctcatttgtaggaaaacaaagtgcacaaaaatcttaagttataaaattattgcaaaacaaatataaactgcctgaaaacaatgccctttgaaaggagtggttatatacattggacacataagaaaaacaaaacaaaatcaaaacccaaaaccaagcaaaaacaaaactcaaaaccaaaatgcgatagtctgttatatatgggaacagaaacaggctatgttcttatgtttgttacttggcaatttattgttagtgacttggaatttggaagatttcattctactgatactacattacaaatagtgaatgattccacaaatggttactaattattagtattatttttgaattcctcagtgttatttacaacattgtttggtgtcctatgtagcatctttttttcccttagggttagaggggaagggtatttaagagtagaggaggacaaggaaatacagaaaattaacatagtcaccaacaactcagttttctawgtgtgtattaaaaattactgctttacatgttactaaaactaagtatcttaaaatgatcagatgtcatttctcagggattctaaaatgagcaacaaagaaaaatttacaaggcaggctatttctcaaccaaggacttcctgttagattttcaaattatctgataattttgtcagtaatttttattaactgtgtaagttccaatttcctcatgtgttatgccttcagagaaaaagcagtcctggtgccttagacttctgtgtctccattgaaagcagtgaagtcactagttaattaaccttactgctctctttcagatccccatttctgcacttgtctcatttgtggaggccctggaagtgggatacagcaagcacaaaaatccttaccataacttaatgcaygctgccgatgtyacacagacagtgcattacctcctctataagacaggagtggcggtaagtagggataggaactcttaggttccccaaaagatgtaaggatgagtttttaatggtgactgttccaattctgatgaggtggaggccacgagtcatgcattgttttatggacttcctgtttcccaggagtaatctaaccaatatggaaagtcttggagttctccgttgcctctgaaattttctccatcctgagcctgatgagataaatayctagtagtgatttgcgtcttcactgggttataaccaatttaaatataaagactacaactaaatatgtatttctagatatggagagtggtactgttaaccttttgctatggtcaataacaatgatattcatgtatactgaaattgtattcaatgtacttggcaaccatgttacgcaaagttagcttttggtttaagccactaagtctttttcacagggactatagttattcacatcctatttgtatgcctttcattattttaacctaatggtaaatctttacttctaaccatttgaaatgttccttgcttcttttgrcccaacattttagcgctttagatgtttttggttttgctttaaaaawttttttttaagacatggaaatctcagtctatcacccaggctggagtgcaatggtgagatcatagctcactgcagcctcgaactcctgggctcaagtggtcctgctatcacaggctgctgagtagctgggactatgggcgtgcaccatcttcagttgtttttgaatctgtgttctgtgtttactgacctgctcaacttggttgtctttgcttttttctttttttccttgatgtaagccattcatttaaaaagatatagccattaaaggcaaaaacaggtctgtatgaatttttacttcgaaatctcctttagaattggcattaagatagacatactttgggtatagttatcaattatcccataaatccagggcacatttgttatcttttcctccagtgactgttgaaagacttggcctaatatctcactgaattaaaaatggaatatgtgggaggattgtgggctttggagctagatacagtggctataaatccctgcctaattgcttactagatattgtgacctatgataaattacttgagtctctgagcgaaaacttcctcatttttttaaaatggtgaaaaatattccactttstagaagtgctctgatggttagaataaagtatcaaaaatmttaagtactctgcctcataaaggaagctcaacaattaggcattattgttaaaacgttgcagaatttttgtaaaacctatgatcattttttcagttcttccttattataaagctgatttcttaaaaatagtatttaaaacactatctttaaagttataacaagattataaagggaacatttttaactcaataaaagatttttaccaaacatttagagcaagcatcatattgaatgatggttccgtgaatacatggagcaagacagggatacccacattaataytcctacttggcatttttctggaagtctcagcctcaagaatgcagtatgcaatatgatatcttcaaaagttgaagatatattctgtgaaataatgtgatcatctcctttagaaaataaagcccttttagatcaaataaaatacctcgataggtctagacaaaagagctctcctatgcactggaaattaacgagtgtaatagaaaaatgtacattcccagcagtttttaaaaagtatataaatcacctataaagagcctcaaaaacaataaaaaggaaactaaaattaaatcaaagggcacaaaaatgatctttaaataaatggaaaaggcatcatgtttttaatgtgagtgaaacctcagtrctatatagatgtcagtttccctcaaagtaatctataaattcaaagcaatactattcaaagtttcaaggattttaatatgaaacatgataatctgaatctgaaattcatgtaaaataggtatttcacaaccttagaaaagacaattttgtaaaagaacaatctaatagggaatagttcttactctcttagatattacaatacatactgaagctgagcatgtgctgcttgtgaaaaaataggcaaatatatcaatagaattgattagagtttcaaaaaataaacccaaatgtgtattgagaacttatatgctgggtcctttattatgggatactatagactgaatgtttgtgttctcccaaattcctctgctgaaatcctaacttccaatgtgatggtattaggtagtggggcctaggggaggtgaccaggtcatgagcatggagctgtcgtgaatgggattagtgcctttataaaaatgagttcccttccctcttctgccatgtgaggacacagtcatctataaatccagaagcaggccctcaccagatgccaaatctaccagcgccttgatcttaagcttcctagcctccagaactgtgagaaataaatttctgttgtttataagtcacccggcctatggcattcagtatcttaagcttcctagcctccagaactgtgagaaataaatttctgttgtttataagtcacccagcctatagcattcagttacagctacccaaatggactaagataatggacaagttaagagggtatcagtactcttgtagaacttaacattctggtgtgaagttacagatagaagagaccaatgggaagcaatcaagaaaatgttattaatactctgtagagaattaaaatagaggacctacccagggaaggctgggtgttttattacatagtcaggaaaggactctctctggagatagtatttaagctgagataattgtgttttttggcttcagccatgctaagagtgaaagaagagtgtgaccacagagttagtgcagggttttagtacaagagtcctgtaagagaataactttgctacattcaaggagcagaagtaaggcaagcctagtgggaacagcacatgatggggacagtggtgcattatgaggctgaggaagaagcaggagctagatcaggtctggctttacaggccacgctaatgagttccaattttatcctaagtgcagtcagtaggaagccactacagggttttagacagggaagtgatgtgacctgataaagattcaaaaaggattactgtggtgaatggattttaaggcagcctgctaggaaaattctgcagaagtctagtgaagagatgctgatagtttggactaggaaggatgctgctgggatggagagaagaaagtgctgtttctgagacagagttcaaaggactgctgtggtgaataggatttggaacattaaagaggggaatcgagaatacatcttagattcttggtttgataaacagwtgacaagaatgcctggtggcaaaccaagttttggaggaaaggggatcaagaattctgatttagacatgtagagtttaagatccgtagtagacatccatttacakaggccaagcagaaagaaaaagggtgctagagttccaggggagatcagggataaacatgtagattaggtagtcttggacatatcaatagtataagaagacatggaactagatgagattatctaaagacagagtgaatagatagttagaaggggctctgaagtgagtcctggaacactccaaagatcaaaatgaaggcaaagaattagagccaacaatagaaactaaaaaagagtggccagtgacatggggtataaaccaagggagtttggggccatggaagccatggaaagagaatgcttcaagaagagagtggtgcattgcatgggacatgccgatggtcaagtaagataaggacagagaaatgaccattcactctggcaacatggaagtcattgttgaccttgacatgagtcatctcagtggtttggtgagaatggaacactgactagagtataatgaagaaaaaaaattgcaggtgagaacatgaagacatgactatagacaacttaatagggaaaatcacccagtttaaaaaatgttttggctacagttatttatttagaaaaaagagaatgctttcactctacttcgagtcattcacccccaaaaaatctgacaaatgaattaaagatgtaagtacaaaagtaaaaatttgatcatattagaagaaaaaatgagaatatgtttatggccttgaaaaaagacattctttttaaaattaarcttttaaacacaaaagttatacaacaaaatattgattaatttgaatacattaaagttaaaagcttttgtaggataaaaagcatcataaacaaattaatgaagtaagcatttggagaaaatacatagagaacatagattaagatccagattgtataaatgaatcaggaaaatgacacaaattcagtcaaacagtatgagcaggcaattaacagaaaaggtaatacatttaatcaataaaagaaatatgaaaagatgcaccattcattagtatctaaggatatataaacttatacagttttaatccattatatacatatgggtaaaaatgttgaaagtgtgataatattaactgttggttaggatgtagagcagggtttctcaacctcagcactattgacgtttggggccagataattctttgttgcttttctatgcattgtagtgtagcagtatgcctgacctgtagtcacgagatgccagtagcactactccccactccagttatgacaaccaataatgtctccagaccttgccaaataaaccactggttggaggggcaattgtcccaggttgagaaccactgattgagaagaaattatgttctcatatactgctcatctgagggtaaattggtatagtcatataagaaaacaattttgcagtgattactataaggaaaaatatacataccaatcctccagcacttccaagtgtacycagggaggcctatacaatcaggttcattgtagcaatgtttgccatagtgaacaattacggagtatatacctatcaatagggagttagaactctggaataccatagatttctatgactaaaattcaagatgtattattcagtttaaaaagttgtagaaaaatatgttctacatgatgtatattattaaacatagcacatgtatatacacatagatatatatgaaagtatattgaaaaacatctaaaaagataaacagtaaattgaagatagtggttacctctggggagattctcatcctgaagtaatggccaaagggaactttatatctgtattgtttgaagtttttgtttgttaacactagtgggtcatcccagtagtgggatcatcttatggacccttattgggtcatcctatcacttaaacagttaaacattgtttaaatgttatttgtaaaattacttctctatgagaccattacttaggtaaagtgagctgtgaacattttaggatattggatataacattacaggctattgtaacattatattatatcatatatcctatgatataactttatattatttatattattaaagttataggatatataatatattctatattatataggatattgtaccattactgtacattgtacattattgtaccattggctatatatatggccaatgtcctatttattgaaacaaataggataaataagtctataatactgggatttattgaaacaaacaggataaataagtctctaatactgtgatcctgactctctctcactctctctatatgtatataggctgtttacatatatatatagtctatatatagtcaataaatcataaatgtacatagtcaatagtcaatatacatatagtctatatatatagtatatatatatwgtcaatacatcatatattatgatagtttccctatgtcattatatatttattataagaaaatcttaatagttcattattgggttattctatcacttaaacagttaaaattttttttcactactgtaaatgatattctggttagcctccttgcatagcaatattttcccactaaagtttcatatgtgtgtgtttttactttttattgttaatactagtaaattaaacattttccttatgtattaaccacttttattttctttggttataacatctccattcctgagaacttaatattttgctgagaaaatgtttgaatttctcagtattcttaataaaaatgattacctaatgcctagcatacagtagaatattagtaaatgatagttattattattactaaacataagtaatcatgactagcaacacttgtcatatatgtgaaatatttcaaaacttgtgattgccttttaattgtatgaccttatatatagactttcttaaaaataacataaggtaacatattagtgggagaatgcatcttcttcactcctaagggtttcattcatttggagtgttttccttagggtaggctgtattttgctacaggatcaaacaatccccaaatctcaatggtttagaaataatatctgctttttttcacttcccgtaacagtaagttaaagaatctgcctgtgtcattctcactccaagggcctaggttttctaaacagccaccctcctgagtgttgtcaggcattatggtagagagaaaggggctctggttttcctatatctgtatttaaattctatggctcagaaactctgctcatcacttctgctcacaactcactggccaaaatgactcacacagtccctcccaaccataaaggggccagaaagtctaatcctactatatgcttggaaagaagaaagccaaacactctctgttatttatttatttctccctgtctgttttctcttctgtctgcttctggcacttctcttagaccttctgaatgcatcttcatacctcttagcttctcccatgttttccagtctttcggtattttaatgatacctcctgagagatgtcctcaactctttcttccacattatcagtttggccttccgatatgtccttctagttattcaacctgtttatttaacatttttagttagcaatatttttaatttcaggaactcctctttttttgccctttgaatgtgctattgtcttagcaaacttacatatttatgaatgtacctacacgttttgaaaacttcctttaaaagtctttttaaaaacagaattatctcttttaactgatggggaatatgctatttgtttatgagaatcttcttacactattggcttttttccctcaaaatgtctagtgaagtttggttgttggaacatatttgtaagtgaatgtccaggtgggttagatgggtcaggggtgtgggtgtcctctgtgtttgtgtggtctgtccaragagacttctagggagggcatggcagctcttcatcagcaacagtcttctcagtgtccttcccacctctttgactgtagctcttgtccttatgctygtaaaatggctgatgtacctttgcaaatccaggtaagaagataaggcagaatacaaagcacaaaagttggaaaccaaataaatctgcccacttttaaagagctatccagaaatccgaaccagcaactttcacttctgttttattggccagaactgtgtctcatggccactgcgatatatagggaagtctgacacactgccatctcaaacaaaatcagagacattgttagtaaggaaaaaaagggcagttgggcaatcaaaagtgattcccattacaagtaatattattcttattttaaggaagataaatctctaattcatagaaattaaaattattctattacaaagtagctatatgggctaaattgtatttctcattgattcatatattgacatcctagtccccaggacctcagaatgggactgtatttggagagatggcctttgaagaggtattaaggtaaaataaagttgtatggatgggctstaatccattatgactggtgttcttagagaaagaggagattagaacacagacatgcacttgcaggtagaagggtccattgtgaggatacagagagaatatagctgtctgcaaggcaaggagagaggtctcaggagaaaacagtcctgctgacaccttgattttggacttttctcctccagaaacgtgagaaaataaatttccgttgtttaagccacgcagcccgtgttattttgttatggcagcccgagcaactgagtacagtacgggagccagaattcggtcccagctctgacttcagaggccatgcatttaaatattaggcatgcttctacaatatgcctttggcaaaaaaaaaaaaaaaaagcctcttatattcttacacctcagtatcctcatgtgcacttacttccacgtattgtgatgaggatgaaaatggatgcaaaaatgcactttgaactcatctattcaacacacctattgtgcagagtgtactctggggacataaaagtgaatcatgcacagcttcttcaactctcaccaaaaacacccagcatttatgccaatacaagttatcattaacataaatgttgtatcatagcagtgatcatgatttactgcatgctttcttaaatgagctcatttctcatttgccgttgaatttccgtgatcgattcagaccatatttagaatgattcttaaatatagaaactatttcctacctactctctctttgaaatgcagctcaaaacaaacttctttcattgtgagcttacaaaaacagtggggagcattctgatgaatggagaacatactgttactctaacctttcattacaaaccaagagggagaaaacgctttaaatcatttcagtgttataaattgtaagacacrtagagaatcaaaacaacccattgataaagtggtgtctgggcttcaacatcaacagtgatactttgtaaatgtaaaacattgtaatctgtttgtattactcattattgtttaacttaagtgcctagaagatacttggatcctttcagaattattttgctcatttccaagagaaaatccttagacagaaataaattgaagagctatctattgattgaatagatgttcattagattctaagctctagtgtacttttgatttaggtgaaaagatttcaaactccaaagctatcccttggccattttccttgcttttgtcaagcaaggtgccagtaattttccctttgtctttttttttttttttttccagaaaggagaagctgcrtatcttatttttatttattttttatttattatttattttttatttttttatttttattttttatttattttattttttatttttttggtcgtttatgacattaccataatgtcatattattaacatattaatacataatatcaatgtattaacaggaaagactaaggatatcaaaattacattttgtttgaagagtgccaaataattttattggggttgttattggtagacatttggctcctgcaacctttgttctctggtgtcacatgtgtttattaatatgttacattggattataaaagagattttgcagatgcaattaaggctaacaatcagaagaatttaaatagggagattagcctggattttccaggtgggcccaatgtaatcacacaagttcatcaaagtcaaggagatatggccaaagtcagaggtttgaagtgtgagaaggacccaacagtcattgccagcttgaaggtgaagagggaaactgtggaaaaggttagaaggaaatgaattctgccaatgccctgaatactcttgggagcagattttcccccagagccaccagaaaggaaacctttcccaaccttgatgtcagccttgggataccctgaccagagaacccatccacactggcctgggcttctgactggcagaactgcgtgccaataaacggaagttttttttttttttttttttttagacagagggagtctcgctctgtcacccaggctggagtgcagtggtgtgatctcagctcactgcaacctccgcctcctgggttcaagtgattctcctgcctcagcctcctgagtagctgagattacaggcacccgccagcacacccggctgatttttgtattttcagtagagatggggtttcacaatgtttgccagtctggtcttgaactcctgacctcaggtgatccacccaccttggcctcccaaagtgctgggattataagcatgaggcacckcgccaggcccggaagtgttctttaagcctccaagactgagcatttgttaaggtagcatggaaaactaacagattactaaagaaactctatcattcacatagaaaagtcacaacttgcttgtagtatctcctctaacaatgagaaattggccatgtcctttcccttcaggtttcctctgctctgttgtaccccatgtctcctcatctgcccctatatgcgggaacaagtggcttgctttcttgagtcatacacagcaaaactcaaggtccccaattgccacttgtcaaagcatcctttcaaatgaactagttgtgacactcatattttgtagataggaaaatactgatagcatctgtgacttgtaccttgccaccaattggtaattctggaataaaataccagtgggactttaatttctgacttcttatgggttgacataaaacctyctgggttcacagtagttaatttggaagaggcaaggaaatctgaggtatattaaaataggaagttcaatttcctccaaaatagcttctcccactttctctgtttctgttaatgatgctatctaatatcacctgaggggtttattagccactcagtgaggctaggagtkttgaggtcatctaacatattgttctccttaactgcaacctcatctggtcctcctaccacttccaaaattcagataattgctaagtcatatggcttctacctccacactrtctgtacatcctatatgaacttttcaatctaaaaatacagcttttagccaggcacagttgctcacgcctataatcccagaattttgggaggcccagatkggtggattgcttgagctcagaagttagagaccagcctgggcgacatggtgagactcccatctctactaaaaatacaaaaaaaaaaaaaaaatagctgggcatggcagtgggtgcctatggtcccagcccttacttgggaggctgaggtgggaggtttgcttgagccctgggggcagaggttgcagtgagccaagattgcaccactatactccagcccggacaacagagtgagaccctgtttaaaaaaaaacaaaaacaaaaacaaaaygaaaacaaaaaaaccctgcttttatatctcccttctctcctcctgtccaaatatccttcctgaagtggggagctgatggcatgactctcttgcgtgtgaacttcactgcctgctgaatctggtttacattcctcgctcactgtgttttctaatgcctgacctcatagggcctcaatcagccttctctcccgctccagtcaagggcatcattttcttacctgaggtggacatgcttttgctgctgggacttgctcatttagttcattcttctgaaaatgcccaccttcatttctttctctgtcaaattttcaaggcccatcttaaacatctctcctctgtgaagctgtttctcccagatacyacttttctttcttcttatccccaaagcagcataactgattctaagcatgcatggcgtttgttgaaaaactaaggtggtaaaatgagttttaaagacaatggttttgttttttattgttrttgttgttgaatgcctgtttaaccattcattgtttttggtttaatagaagtaggttatatctaagataggattttgttcaattatttgggtaaggagggaagcatcactatggttgtaatgtgagaactgtaattatactgttatttagatgctttctgctgcctgggctgatgttctgtgactaggattcgttgagatgttacactgtctcccattcataatcttattttaaaaagtgaaattaactttacgtgaccttagaataagagatatatgtgggagaggaggtagagggaaccagggacagatgggtggggacaaaatattggggaagaaaagaaagacaatgccaaaatggaaaaaaaaactgcatatgtaatatatgtatggataatatcaagaaaaatgtgcaatataaatttatgcctatataattttatgcaaaattgaataaacacatgaacaatgatccaaagaaaatacaatgtaagattatgagtgagaattctgcaggcgtggtgtgtggcttgtcagatgactggctgtgtgaccttgagtgagtcctgcacctacccctggcttgtttccttatctgtcaagtggggatagcaacagtacctatgattacagagctgtgagagttatataagtttctatataaaagcacctagcatagtgcctgccacatggggggccccccgagacaatgaagaggctgatgaggaggctctttgctgcctttacaaggggttttgcagctttgatttttcttgcaatctttccttatcttgcccatctttttttcatctcattttgttgattttcatcttagtctgttttctctttgactttctgttccgtgtacctcaatttgtgtttttgaggtatattattgaagatgccagaaagcttcctgacatttcatgctggattctgttaggaatcattttcaaaagtatagtggtttattttttcatgagttatgtttatgctcactctgaagtatttttcataagttctatgtcatttgtttattttccccttaccaatttttaaagaaggcaataattctccaaaattagtagttaattgaaagatatggcttaagtgggaaattagaaacacttaaatgytcattttaactcattttgcgttaacttaaatcatatgaatctattttatgcactgatctttaattcagaccacagggcttttatgagttcaccagtttggatacttacatttgtcttacatcaaccctgcccstatctaagatttctagtctcatctctttaaagttaagtgggaacttaaagatgtgcatgaagcaaactgagtgcagaagctctctaacttttctataaatgtgttctgctctttcacagttgtcacacrtattttgatagcagttcttttagtgastgtccaaagcattaaacttaggttctacagaaataacaactccaattttgtgtccatattttattggtttgtgtcatatttaattacataattataataacaaatacaatttattaaaatgtggtttagaataaatcatactgaatcatgtaggcatgaatttaactagtagcaaaagtgagcaaaggatatgagaaggtggcctgagtcaggcatattctgtcgtgtgagcatggggcaggatggtttacagaagcgataggaagtaaatccacagagtccgttaaatggaagtcagttaaggaagcttgaaacacagcagtagttttcaaactctagtgtgcatcagaactatctagatggcttggtaaagcacagattgctgggccacaacctagcgtttctgatccagtgagattggggtggggctgaagaatttgccagcatttctaacaagctcccagctgacaccatctgcatgtccaaggaacacattttgtgaaccactgacccacagccaatgttgatggtgtggatggggagaagtcctttcaaacatcatcagcatgcatagagcagaaagccagtatttttccatctgtctctacccacttcctagtggatatcctcctataatcagacgttaggttttctattactcttcattcttggtattgcattcaaatttctaatttttttatgtgtgtatgtgtgtgtgtgtgtgtgtgtgtgtgtgtgtctacctaggaactttatttggaagttgggggaggatgcaatgagggcttttcaagtcttcatgttcattctctttgatttcttgaaaaagataaaactactacttagcttattcaaccttgctgaacacattgttaacaaatcacaagtctccaagtctcttcacaggaaaataacttatttctgtctctcagaaaacttgtgtttggcaatagcttaccagctgcagggtagaaaggcagcactgtgggtgtgttgtcagcaagctgaagactttgagaaagaaacagattatctgattgctctgtaatctcctttcagaactggctgacggagctggagatctttgctataatcttctcagctgccatccatgactacgagcataccggaaccaccaacaatttccacattcagactcggtgagggtgtttaaatgtttggaagagaggcaagaggggtcagagagacagttttagaaatcagaaaggtgttagtcacctttcttttgcataggtttcctattttgaatttctgaaacaatgaacmtctaaatgagagatcagtctgntnagcttcaatcaagacttagagtttaagaagccatctgctcctaattctcctattttgttcagatctcatatagatatctttttcttctctattctaatgttcgctatttgtttatgtatgttctgtacatacttnacctacttctaacaggaaatggggcagtttacgtaaaggcccagatgacacataaaggaaaagaataaggacagtgaggattagagtgtttttgttgacattaacaacattgaccaatcttaccctctgatctctgrgattctgatgagatctcttctcatcctctctgatttcgtatctgctctgtttagtgcttgcaccactccctggcacagggccccgggagtaagtttgtctcctgtaggctactttcaccgtgagcaacctgtgcatccttcctaatggactgcacaggtaawcacaaacctcccgtcggagacattaaatatgggtccaagtgccccactyggaacctcctgacctgtaacagatactgttagttgattttggtactttttcttactaaactgtgggtttattctgagtattcctctcagcacagaattccaggcartagcaccagtcaattgtcatttctacttaggataaaactttccttgccctctcctagcctaagaacttgccctctcttaagacaatgatgtggaactggagagagtctgacagtagagttagttcattatccttgacatagtaatcaaaaggagctagggtatggggaaargtggtaagtcaaagagaaagaatgtagcagggagggatgagagtttaacaccaaataaatacttgctgatttcacttgaaaaagcaggtgcacactctagataggtttgtgttcattaaatcaatctacatgtatttaatgaactcaacacttgattacagtatacacaaaagaagacaatattgtctgatctctgttcagaaggagaattttaattgaatggaagcagacaaaagaacttcagctacttgcttcagttccaccttcttgcctcctcacttagtctcagccacagaaaagcagctttttgtggttgtgttccaagggaacagaattccctttaatacagggaattccatagagtagcactgtttaatgtatgtctgtgggtggaacctttgctctgaggacagagaccatggtgaatagcacctgcscaaggaagagaggtgggttgaacatatgtgggtcttgcctggagacgaggatcaaaaccagtcccaacacagaggagaatggctttattacaggaggtggaaaagtgtcacgaaatatacatcagttggtatctaacttactcaacagatgtaacagcagatctttcacctcgggatttgaatgttctgcgttatctccataggagtgggaaaattccaatgtgttcagttaagcttggtttggaatgaaatttaaacattggccctgttcaacagaactttatccaaagcctctcagcctgtgtgatccctgttcagaaaacaaagtctgtgaccaggcccttaatcctttgatgaataaaattttaagcctaacagtttcaaggtatgatagatacagcccaaagtttggccaatggcaggtggaagttatcttggggaagcactggcccaactgtcagaagatcttgccttcatcccagccctgccacttggtcaccaaagggctctaacaagtttttttaagtctctgaaactcagcttccttggtgagaaacaaataatctaagctttcattaaatttaagatcttaaaatattatacagtcgtgtgtttagtgacattcagctatagtatggtctttgagataggaactaaaaactgacattataatctttatattctttattctcaattttccacatgtggcttttgcatggaaaaatgttgagatcaagccactatcagaggcagcttacagatagtacccaccaggtgatatgtgttctgaaaattacaactaaaataaataaaccagtgcattcattgaataaaataaaaataaaaataaatgtcattccagaaaatataaagaagtttgacatgacccatatttttaaaaaaacacctttgcaactaatataggtaattgagatctggttgtaaaacagttttgagagagttctcaggctggatgtcacatatttcctgcccacacatgtactgatataacataccctacattcatctattgatgatttgtagtgttagttgagcttttggttcatataactggcatggggacaaagataatttctaaacatggaaaaaagtggtggtgcgttctagcctgttagaattacccaagtaaatcacaactgtttaacattctgaattttgcttggctttctgttcaggtctgatccagctattctgtataatgacagatctgtactggagaatcaccatttaagtgcagcttatcgccttctgcaagatgacgaggaaatgaatattttgattaacctctcaaaggatgactggaggtaaggatgagaaaagagagagatttgtaggccagggaaggaactttgaagttggatgaagtrtgctgtttttgagaaaagaacaccttgcttaaaatgttgattcgtgttgctttctctctctttctttctctcactctcaccctctctttgtgtatgtatgtatgtcttatttctcttttttctttatacagatattcaaatatttataaataaaggctatggaatgttatgattaagytccaactactttattttgccatctttacattgctttttattgatgaattgggaagtgaaaccagtttgagtcaaataattcaatattgtcctaaaaattctcaaagaagaaagtttgaaaaatcacttctaacagtgttcaactgaggacactttggatatatttgcttttttttttaaccttaggaaacttgtgttkcttttatctgaattccttaaatctgaattttatcttttatttaataacatgtgtttttcaccctatatttgatttggacttcttatcaatcttttgacattttctaaggaaattattggacacttaaaaaaattatgtacacttaattctgttgcatgaatgacagaaattgtgtgtttggatttaggcacatacctgtgttttgaatatggactcagtcacttactagctgtatgacattcgggaagtgactcaatatctttacatctttaaaattttaatttcttgaaaatagatagtaacatttattctgcagttgggatagattatgataaatgacataatcattttaaaatgcttagcacactttgtctcatatatagcaagccaataaatcatcgtagctataaatataggttaaggtacttcaaaccctgcaggcagagatcatctaaatccttacaaaactctgaatccgttgtgactcaaatagtcctcatattttaattaaataatcagctgtttattgggtatttgtgtgctcaccatctttcaaggatttagagaaatraactttactgaacaatctgagaggctgatttttattaagagtggctaagagtttccatgtagctttagtttattaaaacatatgggaatatttgacttaaattttattggaatatgctagactcagccagcatctgaaaaatgcagagcaattcaattaatcattgcaccacttcaggaaaaaaggaaccctctatccaattttactattggtaaaagttataataaaaggtttgattacaaaaattttcccccattatgtaggttgcccattcactctgatgatagtttcttttgctgtgcagragctctttagtttaattacatcccatttgtcaattctggctgttgttgccattgcttttggtgttttagtcaagaagtctttgcccatacctatatcctgaatgctattgcctaggttttcttctagggtttttatggttttaggtcttactttaagtctttaatccatcttgagttaatttttgtataaggtataaggaaggggtccagtttcagttttttgcatatggctagccagttttcccaacaccatttattatatagggaatcctttcccyatagcttgtttttgtcaggcttttcaaagatcagatggttgtatatgtgtgctattatttctgaggcctctgttctattccattggacagaacagagcctgggtgacagagcgagactccgtctcaaaaaaaaaaaaaaaagaaaaaaaaagaaaagtaaaagtatgtataacagaagtagcatacgtatgtttggaaaatatgttaagaggcaattatgcaagctttagaacactttactagattgtcaggaagccaggattatacacgatctaaatatctaaataagccctcacacaaatccttcaaaaccatgatgtatctgaatatgtgtgaagctgttctctgccatattcaaaccttttattattattattattttgagacagagtctcactctgtcacctagactggagtgcagtggcatgatcttggctcactgcaaccttcgcttcccaaattcaagcgattctcctgcctcagtctcacaagtagctgggactacaggcatgcactaccaggcccagctaatttttttgtatttttaatagagacagtgtttcaccattttggtcaggctggtctcgaactccttacctcaaatgacccactagccttggcctcccaaagtgctgggattacaggcatgagccactgtgcctggccaccttttattatttttttcaaacctttttaaaaattttttttattatattttaagttctgggatacgtgtgcagaaagtgcaggtttatacatgtgccatggtggtttgctgcacccatcaacccatcgtctacattaggtatttctcctaatgctatgccttccctagcccctgaccccctgacaagccccagtgtgtgatgtttccctccttgtgtccagtgatatctgatgtattgcttactgaacctatacagagtttgtattttgagtataaacaagttaattrcctgctaaaacaaaacatcaacaatcttcagagcaatataacagaacccagattccctacaacttatatccataatgttcaggatacaatctaagtgacatataaagatcaggaaaatgtgatttcttagtaagggaaaagacaatcaatagatacacactctaggataagccattgttagaattatcagatgaggactttggacttttaaaacaactattatttctatgctcagtgaggtaatgaaaaatgtgcttgtgtataaaattattttcaggtaatagaaaacaacaggagtgtgtcactaatggagctgtgttataagggatgctaaagaaatttctttagaactttctttaaggtagtttcaaaaatattattttgttataaggtttatgagtaaaatgaaaacataaattaaaamcaaagtttagaactgaaaaataaaatgtctacatttagaatttgctacataggcttagtgcatgatagagaagacagaagaaggaaacagtgmcttttaaaaattcatttttcaggtttcaaagttggaaattatttgatttgaaaaagtaagaggaaaaagctgttttaaatgagtagaagttagggacatgtgggataattttatatgagccaacataagggcaatttgagtctcagaaggagagaaaagagagagaatgggaaagaaaaagaatttgaagaaataatgactgaacagtttccaaatattgccaaacatataaatatacagattcaagaaactcagcaaacctaaaacaggttaaattcgatgaaaagaacactgaggcacatattatagtcaaactgctgagaggcaaagataaaataaagaaaaatgacaaattacacttaggagaacaagttgaatcacagtagactattcattagaaactatagaggccagaaaacaatagaataatttatttaaagtgctaaaaagaaaacaaaaagccaacacaggatgctacatcctgtgaacatgaacttcaagaatgaagatgaaataaaattattttcagataatagaaaacaacaggaatgtgtcactaatggagctgcgttacaagggatgctaaagaaatttctttagagctttctttaaggtagtttcaaaaatattattttgttattttatattttattaatttttagattaataaatctaaatatttattggaaggaaaatgatatgatagtgaaatcagacttttagaaaagaataaactgataaatatctgggtaaatgtaaaataccatttttcttcacttatttaaattgtgcatttgaccatttraagcaaaaattacaacaccatctcatgaggtttgtatgtagagaggtgtaatacatgtgacaatgataacataaagaccagttaatgttagtaaatggacctatactgttgcaggatttttaaatgttacataaagttatacagtagacagaaaattaaagatgtatgttgtaatccccaagcaaccactaaaaagattaaccataatagctaaagattgttaaagtttacctatttatcaaaagataaatttaaattgaccatttagcagtagataaattaaaattgatttaaaaaataaataatacaaaaaatatctcaagcagaaaagttaatgcaaagggaaaaaagcaaaggtgataattagaaaacaaataataacatgctagacccaaatgcaactatattaataattacattaaatgttaaaggactaaacattctacttaaaaggaaaaggttattagaattgataaaaaggcaagctccaactgcaattgtacaagagatacactttaaatataaatacacaaaaaggttcaaagtaaaagtatgtaagatgtaccaaacaktaagaataagtagaatgcagtggtgttattaatattagctaaaatgaactgcaagaaaaaggatattgtgaaagagaaaggagattttctgataataagagtgtcatcagaaagatacatcagtcataaataactattaggtaactgtagacttccaaaacataaaatgtaaaaattgataggagaaaaaggagaaatatatattttcacartcataggaggttttaagattcttgcgtcagcagttgatagacaaactggacaaaaatatcactaaggacctaagaggatttgaacaacatcagccactttgccttaattaatatttatagaacaccatgcaacaactgcaatatacatattcttttcaagtacacatgctgagacattttaaaataagttttaataattttaaaatatcataagcttaaagagtatgttctttgaccttaatggatttaaattagagatcaataagatatctaggaaaatcctgtatatttgaaaattaaacaacattcttctaaatcatttgtggatcaaaaagtaatcagaggaaagtaggaaacatttcaaatttatcaagaatgaaaatgcaatatattaaaaatgtgtgcaatactattaaaacagtgcctagaggaaatttacagctataaatgttcatagtaggaaagaaaaaagttccaaacacaatgacttcaggaagctagaccaaaacagtaatgtaaattcaaagtagatagaagaaattagtaatgataagaggaraaatcaataaaatagaaaaaataaaaagaaaaaattaagaaagctcaagctgttatttgaaaagagcaacatgattgacaaccttctacctagactggtcaataaaaaggagagaacacaaagtaccaacagtatatcctatacatatgaaatacataagaaaatgttacaaacaactttatctcaataaatttgacaactttgatgaagtggataaattccttgcaaaatacaacttaccaaaattcacacaagatgaaacagaaagtctgaacaatcctatgtctgttaaaaaattgactttgtcatcaaaaatattcccacaaagaaatatccagccttggatagtttaactggtgaattctatcaatatgtaaagaacagataataccaatcttatgcaaatgtatttagagaaggaagaaatactgtgcaatttgttttataagacataattttgataccacactctggaaaaaaattcataaaaaggaatgttaaagactaatgtattttatgaacatagctataacaattctcagtaaaatattaactaattaaatgtaacaatatactaaaaagrtaatatatcatgtgtgatagttaattttatgtatcaactcgcctgggcctcagtgtgtgctgatatttggtcaagcattattctgttgtttctgtgagggtgtttttggatgagattaacatataagagggtagactgagtaaagcagattgcccttcctaacatgagttgacctcattcaaccagttgaaggcctaactcgaacaaaaaggctgaccacctcccaagtaagagagaattctttttgcctgtctttgaactaaaacaatggctcctcctgggtcttgagctgtcagccttcaagttggaagtacaatattgggtgtcctggatctccacttgctgatttaccctgcagatcttgggacttgtcagccttcataattatgtgagccacttcctcataataaatctctttcttgatatgtatatatcctattggtttctctggagaatcctgactcatatattgggcttatccaaggaatgcaagattaattcagcatgcaaaaattaattaaaagaattccccatatttaaaaacaaacagaaaatcatacagtcatcttaatagatatataacaagcatttgacaaaattcaacacattcatcataaaaactctcagcaagccagaaacagaagggagcttcctcaactggataaagtgcatgtgtgaaaaacctataactaacatcaagcttaatggtgaaatattgaatgttttttccttaagactgggagtaagacaaagatgcttgatcttacattcatcaacattgttaagatgttaatagcaaatgacatgattgcctaagtagaaaatcctaaggatctgtaaaggagctactggaaccgataatgaattttgcaaggtcacagaatacaaggttaatgtaaaaaacattatatatacacatatgcatatatgcacatatacatatatatatatagakagagagagagagagagagagagagacagagagagggagagagacactagcagcaaaccattggaaaataaaataattttttacaatagcacataacatataaaatacttagtagtagctttcaaaaacaaatgcagctcatgttcactaaagattatgtagtattgctgattatagaggaactaaatacatagagagatatactgtcatcatgtagtggaacactcggtattataaagatgtcaaatcttccaaaatttatttattgtttcaatacaattccaatcaaaattccagcagaattatgttggaaattgccatgattattataaactttatatagaaatgccaaataatactttttaaatgaagaacaaggttagaggactcatatttcttgattccaagcatgcttaagttacagtattcaaggcagcatttcactggtgaaagatggacatacgtaactatgggacagaattgagagttttgaaattgactcatcaattgatttatgatgccaaattaattcaatggggaaaagaaaatattttcaacaaatggttttggaacaatgggaaaagataactttgacccttatcacataccatactcaaaaaatagctcaaaattggttataaacctaaacgtaaaagctaaaatggcaagacttccagaggaaaatactgaagtccttggaagtaggtggcggtttctcagataggagagaaaaagcatgaagcatttttttaatgataaattgaactttataaaaattaaaccttttgctctttggaagacaccgttaaaaaaaagcaggccaagacattggagaaattattcacaacacttatgttttacataggttttgaatccaaaatgtgtaaggtacttttataactcaataataagtaaacaattcaattttaaaatgagaaaggtttgaaacagacatttccctaaaaaatgtatacaaatggaatataagtacatgaaaatgtgcctgacatagtcaacaaagaaatgtaaattaaaaccamgatgagataacactacatatccatcagaagaatggctgaaattaaagactcattagaggaggcaaagaaaaactgaaaatgttatatgctagtggtcaaatgtaaagtgatacaaccactttcacaaatatttggcagtttcttttttcttttttaattgagatgcagtctctctctgtcacccaggctagagtgcagtggcatgatatcacctcattgcaacttccacctcctaggttcaagcaattctcctgtctcagcctcctaagtagctgggactacaggcgcatgccacaacacccagctaatttttgtatttttagtagagacggggtttcaccatattggtcaggctagtctcgaactcctgacctcaggtgatccacctgcctcagcctcccaaagtgttgggattacaggcatgagccactatgcccggctggcagtttcttataaacactcagctgtcttataaaccagccattctgcttctaggtattcaccccagataaatgaaaacatatgtgtctacacaaagatttatgtatgaatacccatagtagctttattcacaatagttccaaactagaatctaataacttgaatgtccgttagctagtaaatggataacaaactgtggtatgctcatatgatagaataccactcagcaataagagaaaatgaactattgatgaaccactatatagatgaattgtaaatcattatgctgagtaaagaaagagtacattttgtattatatatgtgtgtgtgtgtgtgtctatgtatatacatggaaacacgtgtgtatatatctagtatctgtgttaatatataatgcgtatgtatgtgtgtataatatgtattatctattatattttaaaataatatgtgtgtatattttcaatgtgtgactattttaaaataatgtgtgtatatatgtatgtatatatacacacatacatacatatacgtatgtatacacacatatacgtatgtatgtatgtatacatacgtatatgtatgtgtgtatacatacatatatacataatctatatatacatatatacacacatatttaatatataatacatatatgtgtatctatgtatgtckacatgtatgtatataataaatatgtatatatgtatgaaatatatgtgtatataatatataaatattgaaatctataatatatattaaatatttgaaatatatactaaatatatatgtgtatactttatgtacacatgtataaaactagaaaattcaaactattttagatagacataagccagatcaaactttgcctggggctaggtttgaggatgatggaagtatttggtatcatgattacagtggtattttcaaaaacttactcaactgttaaactcattacattctgcaatttatgtaaattgtaagcagtttattctatgtaaattatacctcaataaagtcgttagaggcagtaaaaagatcagtgattggcaggggttgagggaaaaaagagaggggtgaatcgaaggagcacaggggattttagggtgctgaatctattctgtatggatattgtgatggtrgatacatggcattatgcatttgtcaaaactggtagaactgtacagcatgcccagtgaaccttaatgtaaactatggactgtagttaacataatgtatcaatattgattcactagttgtaacaaatgcaccacattaacacaagactttaaaaataagaaaactgtgctggaagtgaggtaacatgagaactagctatactataagctcaatttttctgtcaacctaaaactctattaaaaatcaagctatttttaaaaagatggaatacctgtatccaatgtgaaatayggatgattaatttacctccaaggattattttcaagttaattctttcttaaaactctgaattcatttggagaaaagagcattttaatacaattttcagtttcattgaattttttcctgtgagttaattttccaaatgatatgtgtattccatgtatcatattcctaataaatgattttcttaatacttagctttcatttattccttatttgaaaagctcaccttaaagacccaaattagattagaaatgtcagaaatcgttgactgattttcattagcagtggcaaaaaaaaaacactgatttttactttccatttttgacttccatccttttttctccatggttgtctctaaaagggagtttcgaaccttggtaattgaaatggtgatggccacagatatgtcttgtcacttccaacaaatcaaagcaatgaagactgctctgcagcagccagaagcgtaagtgtgcttgtggcttgtgtttttgtttgtataggtgtttgaatgggtcctcgtctatgtggctatccctttaaagagcatctcctttaacacaactttatagagtgttcttatgcaatgattatgtttgaaggagaaagcataaaagttgtacctaccacaataaggtatgttctcatcagggttgaaagaaataatagaggcagcatcagttgtcccyagtgagaattaaaaataattccctgtgggaaactaaattatcagagatccccaatgcagaagcaaccaataaaagtcagtgactcttggattcttgctctctttttgaaggatgcagtcattccagaaatggatttgagtccagagagtccaattccgtaaatatggagaccaagttaatgagtatcccagttgtaggatgaaatgatgtcttttcctcaatttagctgaagtggggtttgagatggaagaacaaaagagattaaaaacttaatgatttttaaaaaactcttamtgaggttctgaagagtgtggttatcatgtgtttgggtgcttttggtttacagcattgaaaagccaaaagccttatcccttatgctgcatacagcagatattagccatccagcaaaagcatgggacctccatcatcgctggacaatgtcactcctggaggagttcttcagacaggtaccttgttgctctctctccatcaggrctgtcatcattggatattttatgaattttatatctcagcaatgctaggataaggactattgagattacagtaattttggagaggggaggggggctccacasattattttgcctcttggtcatgtgatatttgaatcttacctaaatactgctttttaggacattatggtatttttatcctatgcatttctgtttgggggaaaaaaagtatttccttgtagcagtcttttgtcaaaatgtcatttgaggggttcttttactttttttttctagtggctcgacaaaatgacagttactttggcatcaccctataggattaagatgttaatcttgaactcatgtctctattataattggttgggttgtttctttctartggacaagtccaagacgcaaaattccaaaccagatgtggcaatttggggtcaggaaatcactagaaactgccattccagttgtatttaaacttcactccatcctaagttccagagttgtgttgtctataagaataggcaggatcggtctggtgcagtggctcatgcctgtaattgcagcactttgggaggccaaggcgggtggatcatgaggtcaggagattgagaccatcctggccaagatggtgaaaccccatctctactaaaaatacaaaaattagccgggcgtggtggtgggtgcctgtaatcccagctacttgagaggctgaggcaggagaatcgcttgaaccyaggagatggaggttgcagttagccgagatcgcactgccgtactccagcctggcgacagcgcgagactctgtctcagaaaaagaaaaaagaacaggcaggatctttaattattataaattgtttaaaaacaaattttaaaattgcatggaactagagaaatagggaaataaatgcatagcaccaagaccgaagtctttccaactcaggcacatgtgctaaccttatctctagaggtgctgccattcaaacatctgcatccagacatgcgggcctgagattgaagacatgatacatagatttggtgacctaaattataataaattcaagttaatacagctaattcagttaattcttgctaattcaagaaaagagattcaacagcatggattcagagacttctgattccataaaacactgcttaataacacaagtcacaacttcgtcccgcaaactgacaagagatgggctcttttgctatttatttagttttctgaataaatttagattgtgataattcttactcttagatttcaagtctgaatgcagaaattgtagaaggcacctgtgtgtgtgtgtgcctgtgtgtgtgtgttttccttctgaaactatctagtaatgaagtagggctagagttaacagcacattaaacaaatgccagaagaccctttattggagtttatttccactgatttatggcctgagtctaatcaaattgcttctctaattccctatggtcttatctgtgatttatgttgggggagcggggggagggaaggatttaggataaggttggacgagatgttttcttaagacccttttgttaggaaatgcaaggcatttccttcactctgtctatggtgcacatgcacgcacacacacacacacacacacacacacaccgcagcaccccccagctattatatgtgtatgtcaacaggtaccctatttagtttatggttaattctctttgcagagtcattgctcascctcycagagtaattctcaaaggggactccatggtgtggggggaactagaactatacaggtgactccgcaaaatcatccttcaccaagagcttcttttgagctatttttccaaaggctgtttttctaatagtagtaggaggatgttctccaaatctccactccccctgtcatatgctytctttgataatacttttgcaatatcaccctgtactagtctgttctcatgctgcaaataaagacatactcaagactgggtaatttataaagggaagaggtttaattgactcacagctccacatagctggggaggcctcacagtcatggcagaagagtaaagagatgtcttgcacggtggccagcaaagagagagaatgaggaccaagtgaaagggatttttccattataaaaccatcagatctcatgagacttatttgctaccacgagaacagtatgggggaaaccgcacccaggattcagttatctctcaccaggttcgtcccacaacatgtgggaattaygggagctacaatttaagatgagatttgggtagggacacagccaaaccatgtcattccaccctgacccctcccaaatctcgtattctaacatttcaaaaccaatcataccttcccaacagtcccccaaagtcttaactcatttctgcattaactcaaaagtccacagttcgaagtctcatctgagacaaggcaagttccttccacctatgagtctgtaaaatcaaaagcaagttagttacatcctagatacaatgggggtacaggcattgggtaaatacagccatttcaaatgggagaaattgggcaaacaaaggggttacagggcctatgcaagtccaaaatccagcatggcagtcaaatcttaaagctccaaaatgatctccttttgactctatgtctcacatccaggtcatgctgatgcaagagatgggttctcatggtcttgggcagctctgtccctgtggcttttccaggtgcagcctccctcctgactgctttcctgggctgacagtgagcatctgctgcttttccaggcacatggtgcaagttgtcagtggacctaccattctgggatctggagaacagtggccctcttctcacagctccactaggcagtgccctagtagggactctgtgtgggggtttcaactccacattttgcttccacactaccatagcagaggttatccatgaaggccctgcccctgcagcaaatttctgcctggacatccaggtggtttcatacatcctctgaaatctaggcggaggttcccaaacctcaattcttgacttctgtgcacctgcaggctcaacaccatgcagaaatctccaaggcttgaggcttgcaccttctgaagccatggcctgagctgtacctagccccttttagccatgactagagcatctgggatgcagggcaccaagtccctaggctgcacacagcagggggaccctgggcccagcccacaaaaccatcttttcctcctaggcctcttggtctgtgatgtgtgacattttccccattgtcttggctccttgttacttctgcaaatttgtgcagcaggctggaatttctcctcagaaaatgggtttttcttttctattgcatcatcaggctgcaaattttctgaacttttatgtgtcgtttcccttttaaaaccgaatgcttttaacagcacccaagttacctcttgaatgttttcctgtttagaaattgtttccgccagataccctaagtcatttccctcaagttcaaagttccacagatctctagggcaggggtaaaatgctgccagtctctttgctaaaacacagcaagaatcatttttactccagttcccaactagttcctcgtctccactgagaccacctcagcctggatgtcattgtccatattatcaacattttgttcaaagacattcaacaagtctctaggaagttccaaaatttcccacattttcttatcttcttctgagctctccaaactgttccaacctctgcctgttacccacttctaaagtcgcttccacatatcaggtatctttatagcagagccacactctaccagtaccaatttactgtattagttcattttcacgctgctgataaagaatacccaagactgggtaatttataaaggaaagaagtttaattgactcacagttccacagggctgaggaagcctcacaactgtggtggaagacaaaggaaaaacaaagggatgtcttacatggcagccagcaaagagacagcatgagaaccaagtgaaaggggtttccccttgtaaaaccatcagatctcatgagacttattcactatcatgaaaacagtatggaggaaactgcccccattattcaattatctcccacgggctcccttccacaacacatgggaattataggagctacaatttaagatgagatttggggtgggagaacacagccaaaccataacaaaccctctacagctaggagtatttggtccatggcgaaaggatagataatagctaactcatatagtttgaggtattaaagtgattctttttctaattatgagaaagtaaaaatgaattacttaaacatatgaacattttttcctcgtaaaggaaaacttgtttgcacatacatatactcgaataaaaatgtgctagaggcaatatgaaaataaccatattgaatttcttgcctgttgggaagggactgttaactcattggactggaactattttttagtaattaaaattcagtaaattatttttattgacttaatattttaacctagatgccataagctatagtaagtaacacatgtaagagaaatgctgcctcagttcttaactatagatttttaaattggacaattcaaatgggaaatctcaatggcactatagagtgtttttaaaaattacatttggaaagttgggttacattttaaaataagggcatagtctcagtgctgatggaccacacattccatggttactaagagagtaagttacatcttcagttttataaccataatttacaaaatccgagccactgcctcagggtactttttgatgaaatattgactttaaagaagtataagttcacctcgttggtaaatatgtcatgttggaaaaactgtgaggttcattttctttgtattgttgtacaattttatattttgcaaacawctcttacaattcttttaatttaatccgtgtctatagtatttttcccatttttatttattacacgtgttggtgagttttttcctttgttctstatgaaattatcagattgttttattgtttctctttttgtttatagtgccttcactggcctttttatttttatcaattcagttctcctttgagctgcttccagcacaatctgcattaatgtgatagttctagttttcttcccttttcaatgtctttcctgtgctctgctaggtctcattcccctgagcccttgttcttaacaatttcaggagcttctttctgttagtagtggcaccatttatctgatgagtattccccatctgttgtttgtttgaagttctttattcctgcttctgctgctgatggtataatacttccttctcctccctttgctctttttcttttatctcttccttcctcttcttcttcttcacctttttcttcttcccctccatcttctccatcatctctttgtcctcctccttctactcttccgtctgccccttctcctcctcctctcttttcttcttcactttattttattattgttatttacaatctttgagtgaaatgtgttcttttcagaccaactatttgcagatttgtaccacagggcaatcagagcagtagtattctaagctatctagaattgtccttggtttattattagggtcctrtgaagcggtgtgtatgtgcgtgtgtgtgtgtgtgtgygcgtgcatgtgtgtgtgtgtgtgtgtgtgtgtgcctttacttccttacttttgtagggcctcttgcaattcaatgtctattctctgcctagcctcttggcatcttgccttattcctctctgatatttacagcatttggcagccctttctcatatagttttgattttagattacagatttttcctaggatgtgtgattgcatttctgtttcttactctccttatttttgaggtgataatttctgaaagagctaaaactttactatgctatcttaaatccaacatcacaatgcctttctcatatgttatatttgtgccttcctcccctgggaaagaagaatatacattgctgtgctttgttcaacttgatccttctgttgcattcccaaacatttgctttttcttcatttcacctgaaaagactcacttgagatattacctaaatgtctttggaagctcttgcattgacaggtgccatcttctctgtgaacttccaatacagatggagcccttgtctcttttgactggtttgctgcttacatatagctacccccaaatgtataacaacacacataaacagaagttttgaactcactcatgtacagtataggactcatgtttcttgattagcagatggttctatgataagcaatgattttagaccgtattctgccatctaccttgcttccaaagtgcttgtctacatcaaaccagcaaactggggaaaacatggagaagtaggcataagagatattgtaggcctgaactgtggtagaaatgcatcccttctctcgttctgttattgagcactaactggcagtgattctaggcaatggggtctagctgtgtagacaggaaatggaggaggagaagaatagggatktggtgaacagctacctgcctaactgctgtctttagtttgtctgtcatgaatgtctgagtggccaaaggaacttgagtgtttctaaccaaattagtcttttcatttattcaacaaatattcattatcttccttctgtgtgccaactatgtggctttatcagttggagttatcttaacccctactgcaggaatgatacttatttttctgcgctgtcctggaagaaaaaaaaatgagtgagtttttaaaaatcctttgtgtaagtagagacttttgccctcttttgaaaatgttgacctcttcaataaagaggaagtgtatgaataattttaagctatagctatagagtcatacagtattgtgttatcactcaagttggactcatgagtagaagtttattcctctacattatcagcactgtttttttttttcaattcgtaagtatatctgctttccaaagggaattcaagtacctctgttttaaaaataagcttttattagtcgagtctacacagctcaattaaatacaaagcatgtaaattatgtgtatatttgggtatagacaagttcgtggaattaggagttatttagtatcaggtgattgttcagtaatgaaatccaaattagtgtttatattttaatagtcatggagagtgttcacaccctccccattaaaatgtactgacagaacaatttgtatccctgctacatgggaataaaaagggttttgtttgttttagctgaactatcccaccaaaccatctacaccactagaatttatgttataaatgcacttccttttctacatatcacctaggtagaaatcactcaggaggamatcatttttatcatgccacttgagagagcagttttcagtagtgcgtacttgaaataaagaagccattgtgtccgctggggtgtctatataggaagagggtgcagaaggaactgagccacttagggactattcctgagacccttggatgtccccagctcccattgtgaccccactgttgagcttcctcagacacacaccccttttccgtcctttcagttaatgctacatgtgagccaatatccattctctttggtagcatgccttagaaggaagaatcatccagttttgaaccaggcctggttgcaggttgttactaccctttatttgctattacattaatttattgacagtacttattacaatcggagtgtattaggtgaacaaattcactaaaggtttctcgagtcttggccttaaatattagagccacctgttgggaaacaacagtagttctttttatttatttacatgcattttcctctttcatccttataaccctatgaggtagagattactatctcacatttagcaagtgataaaaactaaaatgtatggaaggaaaataacttacctgtgatctatctcacatctagtaggagaaagggattcaagcacaagtcagtagctattatcctgagccagtaaaatgaattagcacagcttcactactataagaagggtgacatattatttttcctttcctctgggggtatgacaagtattaagcctctggcccaagtttttagaaaacatctccattattatttagactcttcataatgcttattatggtgrtgctttttggtgagattgagaatatattggttagacaattgtgttttattgttgtctaacttcatagacacaagcaattatttattctctttttggtccacttttcattatggactggtctctgaggttaaaaacccagaagcacttgctccaagtgtgtgtggctttaggtagcactagaagaatcagtctgaatcagtccagtttgaattttagtttcagacactgcccacatctgggaggagttcattagctaaacaatggccacaggttgacccaggatgacttgagaaaacacagaaattctgcctgcagtgctggctgcaggccacaagacatattgcctgttgccttattttccatggaggtcctagtactgcccaatgaggctttctttacagcaacatgaactttgcagttgggtggaactattggatcccagagggcttcagccttttggtgtcttttatgtagagaagcaggctccataaagacttattttataatgtaattgtaataattaaaataaagaccagtggcctccgtggcggcagaagttgctaaatgaaatctgggtgacccagcctactgttccttaatttactatgaccttttatttttccagggtgacagagaagcagagctggggctgcctttttctcctctgtgtgaccgaaagtccactatggttgctcagtcacaagtaggtacgtgtttgcagctctttggatagaagcaccaaagcargaagcctgtagaagtaagcacagatgatcccagtggttctttggctgggaaactggctccattctgccatgttgtgctcatggctctgcctgattcaatttatggaaccactctgtccattcttttccctggaatgtggcttgttcatgggagaattggacaatgatactcttggtgtctctgtcattccctgtcaagagaaagagggggccccaactttccaaggasataacaagtgtcattggcaggaagcccattctactccatcccgccattctgcatgcaggactgtaagctaacaaggcatttctactcactgatgcttctcctagccctgttttcaggacagccccatttccttgttgaatctacttccatgaatggatcttttaaaatgttttcttccttgtttcctgtcttccttccatcctttcttttctttaaagcacttttttaaggtaagaataacttttgaattgctaataaccataatatatgcattttaaaaatcttcatctgtgggagaggacaccagtgccctatctaagttaaatgttgtcagtgatctccacctttgaagagtctgaagtcatttaagaaaattcaataagaattaggcatttttctacttgtgttttgagtgcttatgctttttttataatgtatattgagtcttcatatattgggcactgctagacatgataatagatgttataggaacaaagacaaattatatatggtacctgctctcaaagacattaaaccagtattgggtgatgggcaaaatgttacaaaaacaaaaatctattagaatgktataatgccaaggtagacttttgtacctagtacgataaggtacacaacagagtgtgtgaaccattaggtttattaagggataatatttgaattgagtcccaagaagtgagtaggcattgtctgggcaaatggtgatctgtgttggaggtgagctaggggtgggtagaagggtattccaggcagagaatgtagcatatacaaagcagggaaacttaaaactgcctggtatggtcagcaaattctaaacatttccatatggcaagaacattgggtacggagtaggatgtagtgagggacgtatcaagcccagattttatatagtgttaataatagcatgtgtttatactttcttgtaggaaatgagggcatatctaaagaattttaagtgaggttaaaaatatataaatttatgttttagcctgtgggcttaatctggcccaccacctgttcttgtaaataaagttttattacaacatagctaagtgcattcatttacatattgtctatggctgctttagcactttagtggcagagttaagtggttttgatagcgatgatatggcctgcaaagtctaaaataactatctggtcctttacagataaagtttgcctaccctgtttttagaagatttctttgccagtagcatagaggattaattggaggattttcagtaagattagaggcaaggaaagtagttgactgcctcctacaggattacaaagaagagatgatgaatatcagaactaaggtagtaacggggcctctccagaagagargtggcacataaggtatcaaggatttggctgaacgcaaagctgagataaaggcagaactctacattaagtggttggaccatgatcccatttacaaaggttgtggggaagcttatgagttagttctggtttggacatgttgagcttaatttgtcaggaaaaaaaaggcaaaaatggtgtcatcaaatactttagtttcagcttaaaactacactataattaaccataatacacaatacatactacacatacacaattacaacactgtattaaccataatacacttttggctatcactgtttccttatcaatcacgatactattggtatttggttgagacaattcttgttttgtcaattacattgtaggacttttaacatcctttactgctgggcattaatgccagctttacctctacctgggccattgtgaaaactaaatatgcattcatacatttccaaacatgcccttcgaaggagaatggacaacatttcctctggttgatatttagtttccttccggttttcatgtgactgtgtaatgaattaccagcatccccactagcttcagctcctattttctctcctgattgtcgcagaacatttgggtgtctgagctgttgggacaatctctgtagcccgacttcagccatctctctatcactatacaaaggtatagttctaggcctgagccctcttccactttccaatcctgtttcttccaactctgtttgccctctcccatctagatgtgcccccctgtacctcaaagtcagcaaatctgaaactgagcccattgtcttttcttggccwtattctccttctatttcctgttttccctgctttgttgttggagtgtctttggcagatcccatacagaggcagtaccacctcctgctgtgcaggtatctgtgcctgctttgcatttccactttatagtggcactggttccagccttctttatcttttgtttaaacaattgcaatagcttctaaatgattttctcatccttctcccttcctgctttcttccttcttatctatcttgccagattaactttccaaagaacatttaaaaactcttatgacaatgcggctcaaacatctccaggagcctccagtgtccacctaagtcccaaccctctatctgaacacttagaagcctcccttcctagagctgtcgataacctgccttcccaagctttccttccccaaatccaaaagaatccctactccctagtcagtccccagacacatcttacaccctcccatctctgtcacttggctttttccattcccaccgcccagagtgaatagccacatcttcctctccacccattcttaagggttcagctcaaatgtcacaacttcaggcaggttgtgttattcagtcttggtcttttacacagctcttatcacagtgcttgttctrtagtgggtgttgagtgtatatttcttaggcactttattgaactgtatcctgaaaagtcataggaagttatgtaggagaaatgaaactgacatgtaatattcaaatcaaggaatacatacagtacataagatcaagccattctcttttaatctgatctggaacttcwagatcagtttcttctggaaagtatggaaaggcccaaggtaatatgtggttcctctgaagcattgctgtttctcttcaggtttcattgatttcatcgtggaacccaccttcactgtgcttacggacatgaccgagaagattgtgagtccattaatcgatgaaacctctcaaactggtgggacaggacagaggcgttcgaggtcagtggggaagcttgagggctgagggtgaggttggcctgtccttgaggatagaattcttcttttgctggggatggggatggtatttcataatggcatttgccttagctccttctcagaaaaatttgtctgcctctttccttttctcagaggagttgaaattgtattatccgtactctccaggctaaactgtaaagggtgaccaaggtctaaatcgtgaccagcaggcacctggtgctgcccccctgccaccctatttgctgcatgtttacctgctgtgcccagacaatccttgctcatgtaatactccacaaagacagtaccactcatcaagaatacttacaaagaaatgaaactgactttcatttcaaggtttgcacaaagaatgaagtagagaaaaagaatcgaaagcttgaaatcaccttctaccaccacatcattatatcaagggcagctcctcatcacttactcctgacctcatcacttactagctgtgcaatcgcaggccaattgtctcacttcccccatctgagaaaacgtggattataatactcagaggtgactgggaagacgaaataagttattaaaaatatgttaaaccttacaacaggatctagaacagaggaagtgctagctaccataaagtctttattagatatactactactattacgactactactaatctccttgttcatgtagaacagtgggctttgtcataaaggaggaagaagagaagtggaatgaataggaaaagaagaagcaaagagcaggaaaaggagtaaagaaagacaggcgttaggacaggggaccccagggatgctccagatggatagaccctcttaagtttgctaacaaggaggacagagccccctgccagagtccccatggccccacagctcttcaggcagtgactgaaatatattctgcttgtctagtccatcatgaatttgtattcctaccagtcacttctttaaccacttggtagcagtagttacttctttgagattttccagaaagatggtgctttctaatatttacaaagttacccataaggtcttttgcatgacctagtccctcacaatctccatgctgtccgcatttccatcttcttccagcaacttaaggaaattatcacttcccctggacttgggtatgctgggatcagaaagacccttgcaggggaatggtagagctggaaagaaagaggagcaagttgctaggtaacttggaaaagtggtcagtgtggaagcaggtaggtgaactgtggaattaagtagatgtcccagttcaaattagtcagtttcagagaacagagcagagaaaattcacatgaggggattctggttatggggaaaaaagaagaggccaaatagcaaagaakaaatatgaagaatatagagactcttgagactgcaatgttgatgtttttcctgctgaaaattcagaatttcccaycggtcatatgtggaaaatagaataattataaacctcaggatccagatatttcacagcaataactttaggagtgctaaccattcctcctctgggcttgctcattggcagacattttccaaacactaactctcttctttggtatgatttttttgttttccagtttgaatagcatcagctcgtcagatgccaagcgatcaggtgtcaagacctctggttcagagggaagtgccccgatcaacaattctgtcatctccgttgactataagrgctttaaagctacttggacggaagtggtgcacatcaatcgggagagatggagggccaaggtacccaaaggtaacatgccacagacctgtccaaaccaattcagcataaaacaaggttgtcctctctgagttatgtgtgttacaaataaagcacagttgctcaggatgcagattcaaattgcygaatattagaatctaccatcttttgatcttcataatatctacgaatcaatgcatgataaaatgcagcagacctgcaagcctcctgacatgattccctttatgctgtgagactaaactcctttttctagtatgaagactctacaggacatgggtgttattatttcttgatttctgctaaacatcttgtcgttttcacttgatatcatgtggcacaactgtgaggcttttatttcttcttttacctaagtaaagacccgctaatagccaccttgccttggccattatgttgggatataaggagctttaattttcttacaggcatttttatattcctttcatattctcagtttcccttcactcattgctcaaaccatataactgatcttctgagatgatggtaaattgtcggtaaacagaaattccctgaagcagacatcatcaaaactaaaagttgtggcccttggtactatcaacagaaaaatwtggaaatttgtatgatttggaaagcttacattcctttgttcatatgtgcatttgtgactactgagcatgtcctccatgatcggtacattctacattatcatactagggagagatgcccttgtgcacaggtagcgcaaacctgagataaggggtctgacactgtgatgtctgattccaggtagggacaaagacatggtggctctgggagcccagtgaggggactgggcttcctagaggtgagccttcaacaagagtcagtttttgctaacatctattgcatgcctactgtgtgccaggttgtgcccggtgcccagggtacagagatgagtaacagacatccttgccctcaaaactcacaatcttgtggcaggggaagggaagagacattactacagaatttcattcaaaggaagaatggaagttcagtcaaagccctgaagttgccaccagcaccaccagtctaagccctaggccctcacatcagacaaaaacacattatcccctccccaaacacaacatctcacatttttaccctcctggtgtcagtataccaggtgagaagggtggggacggtgggtaagagcatgttctagcagtgttggttcccatatattgggttggggctgggggttctgcttctagtgtaggaaagcagcagcctcactgttggagttattcaaaggcttgttcacaaaattctgtccaattttgtgacttgtccataaaattctgttcaagtggctgctcatttcaggtgaggcaaagggtttatatttatggcacttttagggcataattgaacccttatcatttcaggacagatgttgcaccctgagctatggagggagccaacaccttccatattttaagtgcaccctctcctagtccattcaaatgctttaaacatttcaatcttccctgttggcaggcattgcaagcagcgatggcagctactgcatcatctgcaaagaaacactctcttataatcaattacactcattacacttgaaaattcmatttctgacaacatgcaatttaaagaggtacttcaaaataatttgtttgcaattatctggcttactaaaattaccttcagaaactaatcacctggggaagcatttgacagtttcaggagaaaactggccctttaaaaagaacagataaataaacagctaataatttttaaatgcatttggtatggggatagagataactgtgtgtttgaactattttggaagcacaaagaagttgtctgtagccttgcttgggagtttgggaaggcatcatgtagcagacttctgggattaagacctgaaggaggtgttatatttagaaatgggaacaagaagaaaggggttgggcaaaggcacagagcctggtgttacggatatcttgtgggagaatagtttggttatcagggcacatttcaattagcagggaaggggagagagaattgagtcttgacttgcaaggttttttttttttttttggcaaattcagataggttctttgagactcactttggggatgataatgtacatcgcagaattgaggtgaatagaagtaatacctataaagcactgagaaagcagcctgcacaaggttggtacctaagtagtagctgttatgtatgcaaattggaaaagaaggttaaaggtttgaatacgaagttaaggtggtggtgaaaatagcaacctgtaactaatattttataacattcttagcagctcagtaatgctgttgactggttgactggtgctaattagaaatctagttcgcatctgttttctgttggtggtggctgttttgtttgttgctctttttttccagatgaccctgatttcaagaaaggctgtcctccgtggggcacttgaacatgtattgttagtaaatgcactggaaatgggtcttggttttgttaaccaacctgatttacaaaactaggtaggcaagaactgataattattaggaaagattaaataaatatttttatagcccttagagttaaaaatcactattgccaactaaagatgtatggacataacaattttcaagtctgatcaatattgattaatttccattcagtatttagtacttttttttaacatttattttctggtgtaagactaacatgtttaggttacaaatgctgaagtataaaaaatatatataaaagaaaatgaaaattactaattacctctctagacatatataactattattaaaattctgatgttattctttgtaatttgcttttctgtacatatgtataagtaaaaattttgccgacaaattgggatcataatataatattgtcttgtatttggcctttcttttgaatattttattctgatactgaatatttagatttacagtatatgattcatttacatatttttctcatttttgagtttttaatgttgattgaagttttctgtcagctggagcacttctttctttgactaaaattttcaggaagcgggaacaccttctatgttcttaaatgtctagaagcacctttctttkttcttgtatagaactgagatttgaaatagtcaaaattcatatagtattttgggttttctggtcagtttctctctcttttctctgtttttttctctctctttctctctctggttgtaggtagtttaagtaggcatttcagaaaattatatcaagggataattagcccaatacagtttttaactgagaccctatagtatcattattcaggaagacaaagaaatcaatgtatttccccaaaactgtacggacatgcattgtggggtagaactggctctccactgggaggaagcaaatttatggatctcgagggctctgctctaccttaactcttagctgcttgctcttggctgttttcatcccaagtcccaacaccacagacagtctgacatgggaagccaaaggaaacagaaatgaaccgcacatctcttgctttctactagtcaagaagcctagtagatgctaaatctaagacctgaaaagtgaattctctgtatacttgctgtcgttggaagctgtgagcatgtacaaaataactgytctcaagtcctttttcttgttatacgaaaatttcatctataccgataatttcacccagaaaatataaaggaatctgattgcagttaaaaagacctacctcctgtcaatatattttcttttttcttatttatgtgcttgcttgtttcagtctacaaattttgagttgtaccactttgggtgtcatgcagtcgatcacactaatgtcagctatctcagagatgtgactaagagatggaaattgagtagaaaagctgcaggaccacctgctggaacatgattgctgtagagaaatcatacagtaggataggctcgtatctgattagatcatgatgtcagaagggctaccattcattcakgtaaacttgaattgcccgatagctacagttgaggaaaaaccaggtttgtttctgaaatataccccccgccaccagttttttgtatgcttttagctagatttcccatgggaaattggtctgactcagttgtcaaatgaatttctcttgctcagataatattttatactctcttatagcaaaccagcatttaataccttcagtttttatcaaaattatttccaacttggggttattttgaatattgaaaatttgccatggattcagtggggattctgtgaggggcttataaattattttctaaaattgataccaggttctgggtatgaatgaattctcctcttccttgcctcagtttcccactctgtagtaaaaatagtcatctttttactcacctacgttattggttaaggaaactaacatttgtcaaatgactactctttcagaataagacttagagtttatatactttctgtattttatgcctgtttaatttgctgaggactgatgaagatacatacagataaggttacacttgcatataggataaatcacacccgtagggtacatttcatttagtcaacaaatacttcgagtgtgtgctaygcaccaggcaccatgctaagcactgggaattcagtagcaaagatgacatttaaaccccatcctcagtcactgaagaaggaagagataaagcctgagtgaacattccagggaaccttttgtggtcctgcatcctactgagaatgccatctcaccatcttcttctgcaagagcattctttcactctgtagttgtacctttctataaaggccagaagacattatactttacatgcacataattatgttatttgtaaagaaatctttcctcaccttttcaatgtaaattacaaatacatccttttggggagtagaatgtcatgaaatactgaatggcaaacatttaacatttaaatcagtgcttctcaactctgtatgtttaaatcacctggaaaacattcaaactatcctattcttgcccctccttctccagaatcttatttaatttgtttggggatgaggctagggcattggtttggatggatggatggatcaatgaatgaaaacataatatattaaggaagacatcttaggtaagcaaatataaagtcaggagaagtagactaaacaagatatcatagactttcacaaaatacatgtcataaagcctcgtgaacgtgtgaatctggaccaaatttgggctttgagctctttagcaactaaaacaaagggaaacatgatagatgcatagtcactctggtgtccattagattaaaaacaaatggattatttatgagcattagcttttttctaggaccaaggctaacacaaaagaaataaagtaaacacctgataatgatgtgtggagcattttaaaacacatgtagagaaaaatgtaataatacttttcccagtggaagttgatggcacaggctagaagaccttggcagtgaattaagcgctgcatgggatgagtctctagaaccttggaggattgggctctgttatgtgtcttctgtgtaggttattctccataatgcaatgccacctcattgcctccaaagccctgcatgatctgaaccctgcttgtccttggtcatttgaccacgkcatctatcactaagcccttgtcaaatttactttaaccatactcaatgttctttgagcataccaagctcatttctacctcatggcctttgcattttctagttcctctgactgagatactatttgtccagattattgcatggccagctcttcatcatttaggacttggttaaatgtcaccttgtcaaggaggccttccttctccacctccttgtctactgcaatttccctcccctatgctgattatattccagcatattactctgcttggttttctgcaaagcgctttttataaactgcaagtatcttagtcatttgtttacttaattatgatctcctctttataaatccacttgcttgctgctgtattcctcgtacctaaaacagtgcttaacgctacaactgctcaataaatatgagttggatgagtgaaccaatcttttcataaatacttaacctacgcatttctgcggtggttttgactaagcgcagagccaagcccttttataatcaactggattagaaataatgctagcatcttttcattaaaaggaaagacacagaccaggtacctggccaaactaaaggctacctctcatcttgtggacagtttgaagaccatgtttttttcataaggctcaattatccccttccttgttttaaattaacaaacagtgtcctcagtgtgtttgtcttcaattgctctagtgttggatattttccctttttgttttgtaatcaattgtttgtgtttaaactctaggtcttaagcaagcccacatgaagctgcagtttttactgtggctatgggaaagttttatgatgtctctcagccttgatttccacatttgtcaaattgagtcacagtaatagtagctgctgtaaggttgttttgaggatgaaaataaataatccccaaaaaacactcagcataatacttggcagagcgaacacrttcaatagaagctattaataacggtgatattaataatacaattataatattggtttattaattattatccttattattttctccctgacctctcctctaactgttttcagaatgacatcattatgaacctattttattcgtttcctaagtatacatgccaatctgatgaattaagcaaaaatgtacccaaacactcagtaaacaccttagatactctttgtgtactaaaacaggccattctcctaayggcatgacctctttttctcttttctgtggctttcccaacttgccatggatgcagaggagaaggccaagaaggaagcagaggaaaaggctcgcctggccgcagaggagcagcaaaaggaaatggaagccaaaagccaggctgaagaaggcgcatctggcaaagctgagaaaaagacgtctggagaaactaagaatcaastcaatggaacacgggcaaacaaaagtgacaaccctcgtgggaaaaaytccaaagcygagaagtcatcaggagaacagcaacagaatggtgagtagacttacactggtgaagggctcttttcrcggcattaatgacataatgaatggaaactggtgaacaaccctactgatggggtcagctcacagggcaaggcttccctgctcayccagttccttctgatcccacctcattgggctgcaggattccagcagaagcagctaccagctcacctgtgccatcctcttcagggagattgatacctttctggccatttccagctgccctggagachccagtgcctgcctgcctgccagctggggggaaaattaccatgatcaaccccagcacattcctgagtgtaaagtgggtaaatggaaagtcattttcccatatataccatcgctctatgagggccagacctcaggtttgcctgagccttttcctgtaatagatatctgtatatctgtgtgtgtacaagtgtgtactttagggggaccagctgtttcagtttacctgggactgggagacacagagctttctgttttaaaaacagaaaagctccaggcaaactggggtaagctggtcaccatagtgtgcatatagttattgatttcttatatttaatgcaacaaatatcgattaacaactacgtgccaagcaccatgcttagcactagggatttagaaatggaaaggccacaagaagcccaaaatatcaaaggtgatagagacatcctccaaatatttctagtgaaatgtgcaagtgaaagtagtgacatggcagataaaatgcccgaggaacatgtgcagagaaaaacacattagctttttggggactggggattataaaatggggtaaatgtcagagtaggcttcaagagggggttttgaatgctgaagctggctggtcagatgggcgaaagatacttctgagtggagagaacaagatgagcaagtacacagggctttgatttggtttccttgtttaggggcaggcaggaagttctgagtctccagagcttgcaattgacaggttgtggctgaatagcaaggtaatttagcagtcaacagacctagattcaagtcaagctgtgcttctcccttttcagtgtccttggccaggctacttaaccttctactgtttctacacaatgtatatagtaatacctattcacagcacaggcctcacggaaccttcagtaatactcatgatagtaaaaacagtgaagagaataacaacaaatagcatgtattgactgcacactagatgctgttttaagttctctttgtacatattcattctcttgcctgcctggtgcgaccaggtaatctactcagaaccgtgttctagctattatgccacagggccgtggtcaatgatttctacatgtagaaagtgcttagcacgatgttctccaattatttttataattaaccatttataacatgtaatcagagaacaatattttaacacatgtaataataatgatagcttatatcatattccaggaaccttgcaaaaattacttcagttaatcctggtgaccaccctaggaggcacagaaggccattgtcccgactcgtcctgcccccttctggagattgctcttaattcatttgctttgtattcaagtgcattatagtctggaaaaaaaagttataaagaatttaataagaatttttcatgtacccaaactaccatttgatccagcaatcccactcctgggtatctacccagaggaaaagaagtcatatgaaaaagatacttgcacatacatgtttatagcagcacaattcactattgcaaaaatatgcaaccagcccaaatgcccatcaatccatgaatggataaagaaattgtgatatatgtgtgtgtgtgtgtgtgtgtacatatatatgcacgcgtgcgtgtgtgtacatatatatgtatacacacacacacacacacacgatggaatactattcagccataaaaaggaatgaaataatggcatttgcagcaacctggatggaattggagaccattattctaagtgaattaactcaggaatggaaaaccaaacattgtatattctcacacataagtgggaactaagctatgaggatgcaaaaatataagaatgatacagtggactttggggactcaggggaaagggtgggaggggtgtgagggataaaagactacaaattgggttcagcgtataccgctcaggtgatggctataccaaaatctcacaaatcaccactaaataacttacttatataaccaaacaccatcttttccccaaaaacctatggaaataaaaattaaaaaaaataaaaacatatgttcatacaaaaactttttaaaacaaaaatttattaggtacctgttactgttttagagggcagtacaggcccctccttgctaccccttctgaggactgaaccaactgagagataggtaacaaaatcagaaagtcaatgatcaagacatcagctccactaaaactggaacttgggaaacacagagttggtctgctgaatacatgggcttctttacattttgctctgaaatgaatttacacaaccagacactgtatagccaggcacaggacttttcccccaccccagcaccctggcaggctgcttctagagtgacagaaaaggtgtgtgtcttacagaaaacatatctcaaagcagtctgggatgtgggtggctgggccgggctgtgcatgctcaaccctacctcccagataaataatcactcctctcaaaagaggaacatgtaaggggtggtgagaaaggcaaggtgtgtttcttccctctgctttttcttttaacagagtgggttagaaatgtcttgcccttagtaaaagcaataacaataataccaccattttattgaatgcttaacatgtatcagacattgtacttgagattctatctacattaaatcatgtaaaagttctaacaattctatgaggtagaaaaactcattcccatgttgtgggtgggaatactgagtctcagagaagtgaaatcacttgtgtaaagtcaagcaaccattaagtagagatctcaggttaaactctgatctgtgtgagtctcaatgctctgttaggtaaacagcttgtccctgtggtttggtgccttcagggagaggggccatcagagaaatatggaaacttaactgctgtttataagaggcttacaatatacttattccagggattggcatgctttttctataagggacaagatagtaaatattttaggctttgcagaacataaggtctctattgcaactactcaacattgccattttaaagcagccacagataatatacaaacaaatgagttatcctgttttccaataaaactttatttatagaaattaaaatttgaattctacataatatcatatgtcataaaatatttgtcttcttttaaccatttaaaaatgtaaaagccattcttagtttgtgggtcatgaaaaaccaggcagtagggccaggtttgacccatgggccatagtttgccaaccccaggtctagtcagtgggagaaaccaataaatgcaaataagctagtcacaaagaaggatatgaattctaccayagggaaacaaagacccagagagggcagatgtggaaataataattcattttgaagttggttaaggggaaagcctgaaagaaacaaaacaggaacctgagtcttcaacaaggctggcttgatttcacaactgtgcttatttcctgaaataagcaacagtctaccatttcccttaaaaagtaagcagtaaatgagaggtgggaaaagaaakcagtttagagcaataataagaaagcctaatggtggttcgggactatattacagcagcctaattaaaatgmtttataactgcacagaaagtctctttcacttccccttgtttattgagtaacagctcacgtcagccattactccagatacaacccatgggaaattacwtaatggattttgctcaggcaacatcatcaaacaagcatgtgtcactgtcccagcccccttctttgtggagtgcccaggatatcttccaagttagagctgaaggttgttggtgaaggaggggttttcaaggtttgggcacccactggcagtgacaggatcttctaatctttgccctctgttgagatgacttcctcccacagcctccccatccctggctgagaacaggaaccatcatgggctgctggttagcaaycagcaaagggaaccatctccacgacttccagaagacatcctggtgttgctgtagctgtgggtaaagctccagttcagagcaacctagagggcttaaaaagcatgcattaagagtgtgggggctcaytgagggaagaatgaactagaaggaactagtttgactacagtgctcaagatccttgagtccatctctggcttcattaaaatagggaaaagccagtatttggactgttttgtgggacctctgaaggatttcttctcttttggtggtggaagaggtgatgaccatgtcctgcacttaaaatcctcctgtttggaccytggccagagtagactcccctgctcctcaattcttccacctagtgtgtattagtctgttttcacactgctgataaagacatacccaagactgggtcatttataaaggaaaagaagcttaatggactcacagttccacgtggctggggaggcttcacaatcatggtggaaggtgaaaggcacatcttacatggtggtggcaagaaagaatgagaaccaagcaaaagcggtttttccttatgaagccaccagacctcgtgagacttattcattaccacaagaacagtatgggggaaactgcccccatgattcaattctcttccactgggttcctcccacaacacatgggaattatgggaggtaaaattaaagatgagattttggtggggacacagccaaaccatatcacggtccatcccatttcagaattaagaatgagagggaacctgaagagtttattgacttctagcttagcttagtatttgtcaaattccattgcaagtatgtggtttgtagaatatattacagcccccaatagtcctgaatcatgcttagataatcagttctttataaattcataggccaaaggcatttagaaatggaaatagtaaacagaagtctgaaatctaaaacttgaacttcatagagaagttgcaaatactatagttgagggcttggcagttatgccaagagggagatccaggtgcatggttgtggcagatgtgagttcagggtggggtatgaaatgtatgtgtgggcagtccataccccttaacatagatggaatggcctgtgtttgtctaactggctgcaggaacctcaagaaaaaaacttaaatttggaaaacatcctcaatcatttggtgagtgggatattcagcaaattttacaaattggacatttagtgaatgaatctttgatgaagttgtctactttcaataatagtagccccttcataatggggctattagaagatttaataaaatgatgcatgcaaagcatttagcatactgcctggcacaaataaagtaaacaagagtaaatcctgtccctcatacacattccctggaggcccagctcactccaattattattgggatcttttggcttcaataagtaccagtatttgagtgaraatgtgttcttggttttatgcaggctaaaaagaaagcttccattagtaagactggtaagaaaatatccaacacttgaaaataaggctgggtgaagaggcccctgaccttttcatgtaatactggcatattgttgaayacacatgcccagggattattaaattattttagatagggatgcagcactgttatactgtaaagaaccagagagaaaatatttctggctttgcctgtctctttgcaactattcagctcagctgttgcagcatgagagcagccaaggacaataggtaaatgagtaagtgtggccatgtttcaagaaaatgtatttgccataatcgatggtgggcaccattgacccaggggccttaatttgctgaatgctactcttgaagaacatgactgtgtttaactttacttactatttgattcaagcctaggtactgtgaagttatatgctaatttatagatttttgactgagagagaagataaccccaaacgttrtggttttattgccctgtaggatatacccagttttgtctctaacttagcaaatatattttcacgtgtttctaaaatacctgtcaatacccagctccagtactcttggaatcctcttactattccctcataagtgggttaaatacatttttgacacgtgttctaagaatagcattttacaacttttacaaactacattttgacaagatcatttattaaaataccatttctagctctgttttagaataataataactgtattgagtgatatgccttctaatttatccaaaatgcctataaggtaggtattaacatacccattttacagataggaaaactgaagcacagagaagttaaatagctattaattggtagaacttacagttagctcgggtttctcctcactccacagcttaacagtaaatcttaactgcttctcttagaagataagcacataacttaactacaactctgtttaacaagaactttcagcctcaatttctgcatcacaatccaatttccaggacctaacgtgattacaaaagatatttacactcagacacatacactcttatgactataaaattatgctgcactttttcaaaacttggcagacttaaagatgtttataacaaccccctcrgctgcatacatatactgtttgtcatgtttattactttcaggtgacttcaaagatggyaaaaataagacagacaagaaggatcactctaacatcggaaatgattcaaagaaaacagatggtaagagtattattctcattacatttttccataaaatgtgcagtttaatgtaagcttgttagaatcatacccaaaattgaaatagtggttgtgaatatattcttatatcctgaaaaaaacccttcactatatttaaagggtactattatccctttatcaataatttataaattattgctgtatctcttccccttcaccccactttctccatcacaaatgttttctataccctttcttttcctacttgccatttttcatcttaaacatcataaaaagtttattttagacttgctgatcagacagctagaatggagtatcatatactgctaatgtatttataagttttttgatggggaatcatgcagcataaataagaaatgttccatgttttatgttttcatgttttttttccttgaactagttcttatttttgtttaaaacaaaaacaaaaacaggggtctttatagtgctaatgttgggaggcagcatatatggttgtaaaatacagttttgccagcaagaacaagtcctaaaggcaatgacaatgcaaaacgcaagattaacaacattttactgtttctaaaacctgaaagttcaaattatattacccttcacactttgaactataagattgaaacacctgccctggccttttacataaacttcattgtttcagctatcacacaggttcattactagttatcccctcatacacagacatcatattaagctaaaaattaaagtttccacggagtggtttttgagagaatcccagactctctaaatcatacctccctggagacatcatatttgatgctaaactcttctttgaatcatttggttagaatacctttgaagaacaaatgctgggtaaccaggtggaagagtaagaataaattggaacgtaattctttgcacatctattataaaggaagcagcccctttagctttcagccctaagctgttatgacatgctgtctttgcttgcatgcatgaaaaccgttctcaaactttttctaaaaagacaatgcaaataattaactccaggtgtcttattacataatacctggggaacacatacctgcaatttttttttttttaccaatgtgcttatgcaaatggaaatcacttacctaatgagtgtacccttcttgaataattgtgactaagaagtaaattacacagaacaaaatagaatttagaatgacagtctctgagccagactctattataggtaaggtttgtttaaataccagaggctctttgccagccatcaataccaaatcaaggcaaccaaagccagaaaatgtacagtggaggaacgctgtcaacttcaaacccagaacccagacactttctccatcctgtatccaactattggcccacagcttcctgttaaatttctatagcataaaagcccagaataaatcaagtcccaaatttttcgtatgccattttgaatcttgttgcatttgtatattgtggtacaaacatctgctataatgatgtcatgtgggcattgtggattatattttatcaccttcataaagcctttttaactgygccctttgtaactgaatcatacccaagtatttaaaagaattaaacaggtttttttggggggaggggggaagtgataaaatagattttatgttctattgtgcaaataagtgtaaagtttgattgtttaatgagcaggattctggatctcatggggcagtaagcagactgctataaataaaagagacattttttaatgtctgtctctgtttccctccatagcctgttcttccacttcctcaagtaggtcctggtgtgtctgtatacttggaagtttgcacacaaacataatcatgaacaactttgcattttatattcattgatggactaatatgacatcattactgctttggtatcaatagaacttagagcattgagcttcagtgacttgcactattttagtccaaaacctttaacaggactaaagctaattcttggtggcaggaagtggaaagcaatttgatgagtcccacctatccttttctttttggtcattaaagctctctacttcagaaaaatttaaaaaggaaatatgtagatcaggagatatattgattgtttttaaaactatgtagaaaaaactggatacatttttgaacatttctttttggatcctattatgtcaggtaatgagtgggagtcaatttaacaatttttaatgtccctacccctagaccaatccctgggaaccattggtgactagttctctttaatatttgagagggagtatctgggtacaattcatgcccaatgtgaacattgagagagaaacccagtggaaactgaatcacagttggctattcccaaactcccatgagccagggcatgcacagggggaagtagtatgtgctgaaaggtaaattacatcctggcataatgaacacattgcagctgtacattatctctgtaagtctactgcagtactatttcataccttgcagcagtaattttctaactgacttcaaagaatggatgtcctttgaaagtaccttacttacccctagggagaaatgtattgacataaaaagatccaggtctctgagccaagattctaatcatctttaaacttttccattggcatcggaagatttgtgggttaccacacaaatatactcttttcagtgcatttttagtcatgtttgtaataacatagcctcatggacttgccataatttattatagctatccagaaatacaaacttgccgttaactttacttgatcacattaacagagaawtaagagatagccatcttttgtgcctctcaaacaacagattatgattaggccctgcgtggttataaaccaagtcttagggagggaattcagcaggagtttctcctttattgaatatcctggtaactggaatgtttatggatggtctcatgaaactgaaaagtgagttatgaagagtggaaagggtcggcaagacagtctatgaatgtcttcttttgccaaagataagtaacaagaactggatttaccctcccacctgaaacaacccaaaaccccagacagcatatgtggaagagtgctttttaagataccagacatcaggaaatggagaacagtgatctttgggagccaggaaataaatgaaatgagccctacgattgtctcagcttactgccttgagaggacttccaggcagcatagagaggagtgacataggcacgtctcagtgactctctgagttaagaagttggataaaaatccaagaagaccaagatggctttagttaacaggaaaaatactggagagaagaggattacagagagataaactctagagttctgaagaatataagagtacagtagtactcccttactagcagtttcactttctgtggtttcaattacccatagccattgagagtacttccagacagcatagagaggagtgacataggcacatctcagtgactctctgagttgagaagttgaataaaaatccaggaagaccaagatggctttagttaacagaataaaatactggagagaagaggattacagagagataaactctagaggtctgaagaatataagagtacaatagtactcccttattgtcagtttcactttctgtggttttaattacccatagccaactgtggtctgaaaatattaagtggaaaattccagaaatcaacaattataagttttaaattgcacaccattctgagaatgtgatgaaatctcatgccatcctgcttgtattagtctgtcctcaggccgctaataaagacataccccaaactgggtaatttataaaggaaagagaagtttaatggactcacagttccacatggttgaggaggcctcatagtcatggtggaaggcaaaggaggagcaaaggcacatcttacgtggtggcagacaagaaagtgtgtgcaggggaactgcccattataaaatcatcacatctcgtgagacttatttactatcatgagaaaaactcatccccataatgcaattacctccccgagggtccctcccatgacacatgggggttatgggatctatgattcaagatgagatttgggtggggacacagccaaccatatcactgctctattccacctaggatgtgaatcatctctttgtccagcattatccgcactgtactggttctacttactacccacctgtcacttaatagccacctcgtttatcagattgactgttgaagtatcacagtgcttgcaattaagtacctttatattacttaacaatggttccaaagcaaaagaatggagatgttggcaattcacatatgccaaagagaagccacaaagtacttcttttaagtaaaaagacgaaagttcttgacttaataaagaaagaaaaaaaattatactgaggctgctaagatctatgctaagaatgaaatcttctatcaatgcaattgtgaagaagaaaaaagaaatgkgtgtgtaatacatataggkttcagcactatctgaggttttagacatcccctgggagtcttagaaaatatcctctgtgtgtaaagggaaactactacactgagcaacccatgcaatgaggaaactacctgaggccagaacagaaccatccaagaggattagagggaacagtcctgatgctcacacaagtcagggaaaagtgcctattcccactagccagatttatatatctcattatttaaagaaaattaggtaaaagactcatatttgtcttgctttagtcatggggaataataagctgtagcctatatgctgctctggttctatctaacaatcttaaaagcaagacataaaagggatcaaartgtctcaaagtaatttaactgcatcccagaataaagctcaaggatatacatagagtacaaaaatatccagcacccaacaaggtgaaattcacaatgtttggcatccaataaaaaattaccaggcatgcaatgcagcaagaaaacactacccacaataaagaaaaagcccaaccagactgtaaactagctcaaccattgtggaagtcagtgtggcaattccttagggagctagaactagaaataccatttgacccagccatcccattactgggtatatacccaaaggattataaatcatgctgctataaagacacacgctcacgaatgtttatagcagcactattcacaatagcaaagacttggaaccaacctaaatgtccaacaacgatagactgaattaagaaaatgtggcacatatacaccatggaatactatgcagccataaaaaatgatgcgttcatgtcctttgtagggacatggatgaaactggaaaccatcattctcagcaaactgtcgcaaggacaaaaaatgaaacaccgcatgttctcactcayaggtgggaattgaacaatgagaacacatggacacaggaaggggaacatcacacaccggggactgttgtggggttgggggagggatagcattaggagatatacctaatgctaaacgacgagttaatgggtgcagcacaccaacatggcacaggtatacatatgtaacaaacctgcacgttgtgcacatgtaccctaaaacttaaagtataataataataataataataataawaagaaaaagcccaaccaattgaaaccaatgcagaactgaaacagatgttagaattagcagacaaatacataaaagcagttcttataactgtagcccatatgttcagaagtagacacatggaagatctttttaaaagactaaaatcaaacttctaaatatgaaaactacaatatctgatatgagaaatgtgattgatggtattgacagaataacattagatgagattaatggtgagtacactggatggaattagacttcggagaggaaaagagtagcaaaacgatagcaatagaaactacccaaaaggaaatagaaaaaaagaataaaaacagaattgtaggacaccttcaaatagcctaataaatgtgtacttggaatccccaggtagaggagagaggaggaaaaatatttgaaaaatcaggggctataattttgtcagatgatgaaaactataaatccacagattcaagaagctcaatacatctcaagcacagggaatataaggaaaactgcacaaaagcatactatagtcagattgctcaaaaccagtgatgaagagaaaaatttaaaaactgccagagaaaaattacacatatgtacagacaaacaaacataaggatgacagtagatgtcttgtggggaacaatgcaaataagacagtggagctaaattttttaattaatgaaaggaaaaaaatcaacaaagaattctgtgcctagcaaaaatatttttcagaaaccaagatgtgattaagatgttttcatcagacatacaaaaacttaatgaattcatcaccagtagacgcaccatgcaagaaattttaaggaaaggtgaaggataattatgccgtatgaaaatatagatctgtacaaaagaatgaaaagcattaaaaatggcaactacataggtaaatatatacgatttttctaatttatgttaatgataattgactaggtaaacaaaataatataaatgtactgtttattttataacatatacaaaaatgaaatatatgactacagtagcaaaaagtccagtaggggagaaatgggatatctattgtaaggttcagtatcatgcatgaggtgttataaaatcattggaggattgaggtaaattaagagcatatatattataaactctaaagcaatcactaaaacaacaaaacaaagatatatagctgattagccagcaacagataaaatgaaatcataaaataattaatccagaacaaggtagaaaaagagtaagaagggaacaaagaacaggtgagacaaatagaaaacaaataggaagatcacagaattaaaacaaagcaaatcagttatcacgttaaatataaatgacttaagtgccttaattaaaaggcagagattgtgagattgtaatattcaaatatattatgcctttatacaaaaagacacaaatataaaattcctgacttcaccactattaaacatattaatgcaacaaaattacacttgtatcgcataaacatatacaaataaaaacaaaaacaatcaaaaaaggacacaaacagcacaaaagtaaaaggttttaaattggtatactgtcttaacactaatcaaaagaaagcctggtggctatattaatatatgacagtagatatcagaacaaagacaggaataaagaagtttcagcaataaagaagttcatttcataatgataatgttgtctgtttatcaagagaatataatcattttttacatttatgcaccaaatacttgaaacaaactacaaaaacatttttaattcacaatttatttggagacattattatctctttctcaataattaatagactaagtagatatgaaaatcagcaaggaaacaaagacttctacaacactgtcaatcaacttgacataattggcattcctagaatacccaaccatagaagaatacacatctttttcaagtgcatacagaatatttaaaaagatagactatattctgggagaataaattagtcccaataaattcaaaaggattcaaggcaaacaaatatgttcatggaccatgatagaattaaattgaaaggatgtttgtattatgttattattcttttaatatctgtagaatttttaataatgttatcactctcattttttatatgcgtagtttgtgttttctctctttttccctgatctgcatggctaaaggttaatatattttattaatcatcaccattaatattttctattgtttttctgttttctattttattaatatccatctttattatttcctttcttctgcttgctattgggtttactttgtctcatagtttcttaaggtgaaagtcatggttaccgatttgagatttttttttcttttttaatgtaggcatttagtggtgtagattttcttaagtactgctttagcatcatgatccaaactctgatatgctgcattttcattcacattcagctcaaaatactttctaatttccatttggtatctacattgacctaagagttatttagaagtgtaatgtttaatttccaaatatttggggattttccagagacaggtgacatgtaaattcttcccatgttgatctataggttcaatacaatctcaattaaaatcctagtatgcttttttttggtagaaattgacaagctgattctaaaattcatatggaaatacaaaacatccagaatagacaaagcaactttgaaaaaggaaaaagttggaggactacagagaaggtttgatttcaagacttactataaagctatggtaactaaggcagcatggtattggcatcaacacagaccaacagatcaacagaatagcttagatactccaaaaatagatctacatgtgtatggactatttatttttaataaagggcaaagacaattccaagggaaaatgatagtcatcaacaaatgatgatgactgcttgaaatgtcatatgcaaaataaggaatttctaactatacatcacatacaagcgacatctcaaaatttatcataaagctaaatgtaaaatgtaaaactatcagtttctagttaagaaaatataagagaaactctttttgatcttgggttaagcaaagatttattaggcatgaccacaaaagtacaaaccataaaaaacaaattgataaattatgctttatcaaaagcctctattaggagaataaaaaggcagttcacattctggggggatatttgcaaaacatatatttgttaaataactgatattcattaaatatagatactcagtattaaataataagaaaacgacccaattaaaaacatacaaaaaattgaacaaacttttcactagagaagatatacaactagcaaataagcacattaaaagatccttgacatcattaaggatgtgaaaattaaaagccaaatttaaaaccatattaagataaaacaaagcttgtatgaggggatatgtatattacatccacataataatttcttagctctgcatttcactgtggctgtcaggacacagctttgtcagtttgttttctcaatgaggaaattgtatttcttacaaccattctttctgaatatttctcaagataatcatattctcctatttagaatcttagtacagaaaaaatggaggaggcagggtagccagtattcttgttagtttgcatagaacaaataactgtgatcaaaagggttrttgcgtacattataggaatttgcctctaatcatatctacattatataattcttcacaaggctgttgtctcatgaccttgacttgctacatggctcacagtggtcacctgaagaaatgtatgtgttttttctgtttttttcttttttaattttttaaaaaatagatgattcctaacaagttagtttgaaatggagtacataaatgaatttggaatggatgactctgagcttttaaggcatcttttgttctatttgaattgatttgccaagccattaatgaaaacagcagaagaatacaactttacacttgagtggtatttaattttcatcatgttcatattttgaaaaatgttagttgcctatagggtgaggcatcatgacctgctcttcaatgaagctggtagtgaaagataggaggggcctgtacagatgtggaggtatgccctgctttgcagatctggggagaaaagagtcaaacagcaggctgtgggtagaactgacacatgtatgtctttactagagattgtttctgtcttagrttcatttccagagatttgagaaacaataaatgctttgtcacatgacctttattcagcaggtgtgcattcactggttatacggaccctgagggcattatcagttttcttactggcatggacacctgtattccagttttctcatctcaaggaatcatactcacgttattctttcttccaaaaaaaaaatgtccccatactacttaggacgatagttttggattgtctttatatgccagaataaagaactgccctattttagacacctcaaaacctttcttttggttgatgtttcattttatcaccttagttttccaatctctgctatttcttcccacagggcttcgtgttatcacttgtagttgacactggctatgcattggtccatgcagagccatagcaacacttgaacacacttacttgtcttcagcacactcatatttgaatgaatcttatacccccttgatatagaagatgttatggagaattttrtaattcctttaatatttttctcaatttctgaaagatctatttgtttctarggaactgttgatatgatttttgaccaaattctaatggatttaccattcttagaggatggtggtcttagtgaccatttttgttcagacttctactctagtttatgttgcgtcactacacataagtcatagaaaatgtttggcattttgagaattcttgacataggactttttagtgaaatttactttgccattcatcattttgttctttatataagaatggtctcatttgggaaacacaaaattccttcatctgggagctcgggatatgtgatgattagaaagagaggctgctgattagctagaagagctctacacaatggcagaacaaggaattccatattgacagtaaaggaagagttgattatgctggagaggatttgttgacactgaaatgaatacttgtgaccagtgcgtagttttgactgacagtttactgatgtacaatgtgaaatatatactccacatatgctgggatcctcatgtcaactggccagttggtggtttcttcttgaaggaaaacttacttggaaagtcaaattgtatcagaaggttgcttggtgaactgaacatgtaaggggacttagttgatgaattgtgatcttaaggtagaatatcttgaaatctgtttctatcattgggacggagctgccaagaagagtggatatgggtcatcttgcatgtgctatatcctgacagtgcaagaggcacccctctatggcaccccttttcttgcctgttttttagccacacattaattcagccatgagatgtgttaatatcttggagtagattattattcttgttcactttcagtcatccttgattgcttttctgggccttaatcttgacgatactgcgttgtttttaaggtagatgttctcgattttttttcctcattattttttgtccactttagactaccagattttcactagctctacacccctctgaaggtgtgcccagatcatgtgatgtgtaaaataggccaaggaatgtgaattgggaagacaagctgttaccccatccttttctctcacacccaagatagtgttgccatagcaataactttgaatctcttctacttaccttaaaaattaaccctttataacttcagtgcttaactgtttttagtaatgaatcatttgtaatatacttcactagtggtcatgccactgaagtcaaaatctgctattttgaggcagtttatacatatagttaatcccatcctttaggttttaaacttgtttctgtctcaaaggataatatttcttaggtctaggaaggtatcccactgcagccttctatgtagtgacaaaaagtagacatttctttaatgaaggaattgctttcagcatgagaatccagcatctgcgtaggttatttttcatgagcaaagagggaccaaatatctggagtgctttgggttccaattaagtcgtcataagaacacaaattctgactaatatcccatttcccttagccatttgtccatgaaaactcctgtgacccatttccttaacatatttatgtcatgtggaacattaatagtaaggaaatgccatggtttagcaggtgttttctaaagcagttacaaccttattttctcaagtagtttgacaagtatctaaactctccactccaatgtccctgcccaaggaaaacaacaaaaagtcaataaatggaggagagagttgtaatattatttttaggtgtctgtttttctcatgaatctgggtaaaacttcactaattaaaccctaaaaggtttttttgattaaacattttgatttagatacttcactgtcattttgtaattaaatttggaagctgtgctgtagggtgacccaacaataagagctactgtgaattcagtgatgcttaaacccaacgtaattggttttttttatagatttggggaaaatctattaaccaatccataatatgtgagtgggaagtggccaaacggtgttaacctgaaaaagcaccttgttccttttttgctatggacttttagtcttgggagcatggacgtacaaaacctgttacttattcatggttctagcatttcatctgagtcatagtgaatcagaacagttagcgcttttggtaataaacgtccatttcaaatcaatgcattttttatatacttttaggttcagtgaatgtccttgtgcttttcaaggatggtatataatgaatataaaggaattataaaggaacaagatggcaggtgactaccattgtcttcttgcagatttttgtgtctggaaattcatgtttgtagtatgaaaatagcaactgaaattacacacacacttatgtacacatacacatatatatgtacacacatacataaatcatacatatgatatatgatacaatatgatatatctgatatatgatgcatatatgacatataacatgtaagatatattaatatatatcatatatacataatatataccctctatgataaactatattacatacatcttaaatcatatatacatatacatatatatatatgtgtgtgtatatagatatatatatgtccctgtccaaggaaaacaaaaagtcaataagtggaggagagaattgtaatattatttttaggtgtctgttattctcatgcatctggttaaaacttcactaattaaactctaaaaggttttttcgattaaacattttgatttagatacttcattgtcattttgtacttaattttggaagctgtgctgtaggttgacccaaccatgagagttattattaattcagtgatgttttaacccaacataattggttttattttatgaatttggggaatatctattaaccaatycataatatgtggattatattatatattatatgagattgatgggtttaaataaattgtgttatactaagggaaacttctaacatcaattcatgttttttatgtaggtgtttagatcccagtctcttaccaagtaactccatagtagaaatgtcaaataaaagtatattatgaactctttgttaatgataaaattagactttctgaacaacttttcttttgcaattattgctacataagctttcattgtttcactctgtcttctagatactttgtggaactactaatgtaccactgtatttttaaaggaatctggtttgacagagggaattaaaattttgtaactacggggcaaggtgtgatttttcttttttccttaatactgatgttcaagatgtttaaaataaagcttcttagtaatcatgaaataaatattttctcctggaaaaaaatgatattttgtcagattctatgcaagggattggagaaacacaagtaacaatatatttgccaaaagaaactctattaacattatatttaaatatttaaaataaagggaacctttgaagtaaatatgtgccaaaggcagaacttaacactatctacattggtaatgccatttcttttctagacgctcacatgctaaaaaagctattaaatgcartattcagcaagtattcaagcttcccctctttgcattttttcttagcattctccactgatgggcatcctgctctccaagtgaccatgtctacatttcttaagtattagtccgctgcaatatatgctatttttattctatgccctggagccatagtgaaaacatgagaaaatgattgtttgtttggttttctcatcatttagaatcttttctgcttttcctgaaataataaaattgagaaaaacatgaagagtagtcagaatgtttcatgtctaaaatccaagcctcacttactgatctgaaggactttctttayggtcctgggcttcttcctgacttcacagattcaaagactgatcagaaactaaactcttttgtgcagacaagggtgcttaactctaccctcacctgcacctctgtgaatcagggatgttgacttatcatcagaggagttgtaggagttactgatgcctgacttttacttgtctgctaaaagtgggccaggcattgggggcatttagagagttcagtgttttaatcattgtctttgtgttaatgtgctacattcttaaaacagagcatgatagcagtaagacaccttgggcagtgtgagacagaagaacagagacagttgttcacatattttatgtttggaaagaaagaacatgctaaatgaaagagagaaagcaacaagggtagagaggaagagtttaacatcattgttattttcagtggtagcacagatgcagtggagcaaaaggaaagacaaagagggaaagggttggacctaagaactattagattgctgcaaaagtaaatggggtttttgccattggaagtaatggtaaagaccgcaattacttttgcactaaactaactgttctttgtactgttcttattctgtgtgtttggatcaaatgggtaaattttaggagttaatggcataggcaaggttttaagaagttacattcccacaaatgtcttctgtctgtctgtctgtctgtctgcctgcctgcctgcccgcctgcccatctatctgtctatctatctatctatctatctatctgtctgtctgtctgtctgtctgtctgtctgtctatctatctatctatctgtctatctatctatctatctatctatctatctatctggtttatctatgtgtctgtctatctgtccttctgttttatttttctgtgctggaataatacatgatgagaggattttgtcttagcagtgctgtagcatggatattatttgtagtgaaaatataatcctattataataatatgctctattatttagggcaaggagaaagcatgcacatgttgaaaataacgctttaaaatagctgtcatgtacttgtgacctaggacaattaagtccatacctggataaagcctaacagatactttaaaattgttttttcttaatgttttcttcttatttaaaaaaaaaaaaaacgaggacccattcatatgcccaatagaagtcttacatgacatttcaaattggttttggtttctctacacttattcttcattcgtttttttctatttagagttttataacttgtcaggtgtgtgctgtatcactttgctgtttttgcagaaagttgactccatagggaggcagctatggtacagagttcctaggacctgaaaatctggttttgaaccccatctctctcttcagccaagtcaacttacttctttgagtttaggtgatagttgaatcaggctgtaaaaacatcaaatccaagaaaaatggaagagaaatgcatttaaaatattttttaagcccagtggcaaattcttatgagggctgcctcattgacactccatttgtgatccaggaataaacattataatggataaacacatctttagaatcaagtcatgttaaattgaacttcaatcttcttctaaaaccaattatctttaaatcacatggttttaagacctatatacagcatctgcacttacctttgggagcagcatggtaccataaataaggccacattgttttaagtccgtctcccatttttctaaatgaagttgctgaaacatgattgtatgctcctatagagtaaatacatttctgtgaattcatataccatgtatttgcacttcaggatttaaagttctcacagctttaccttgtgaggtataaaaagtcttgggtcaaggggcaggcacttaaatastttcctgaattattccaagatgtggcaagaaagtttccatttcaattcatcagtcactctttaaaaagtggaaggatttaactactttttgtggccttcaaaaagtcatgcatctcagttacacacagagtggcctattaacactttgtcttcagggtcctcattttcatatactttgtagtcttgctgatgcttactgaatttcagtttatattgaaaacaaatacataaaaccagaacacaatgaaagataggatgtggagtgaaaagaggaccaggcctgatttgcaaaccatgccaaagctgcctggatagcaggtgctccttctctgtgagattagctccatagaaagccatccataattgggtttcttcatagggaatgtaaatattttgacatatcataccttactattgaataaaatatataattggtgtgtttattattttcttttaaatttttgtttcatgctgtgaaagtcaaaattagaaaaagggtggagggaaacctcctattcatcaccacaccttatcagtcccatcctcctcatgcttattcaattctcttctttttcattaaaaatattgttgagcatatgctatgtgtcaggcattgcactacatgcaagaagtgttataaacgataaatgaggtgttttccctgttctcaaagagtcagcagtctgggttggaacattattttgcaggtagctatgatatagggaccttagggtatttcttaagtgmcttaagaaattcacaaacagaagttacttttagagggcatgtgtttgggaaggccagggatgatgactcaggtcatcacgtcacagacccagctatagaacatatgcttcttgttcttttactgctggtggtatttaatgacaatgaacacaggcacagcttaaacacacaaacttcttttattcaccctttcccttcaccccttgacacaaagctggaggggaggatggagatccacagccagagggaacactccaccatctcacccataagcagtgattagaaatggaggaatatctcgttttagcagcctttggatttcattaagaccctagataggcctctttccatctctgggacccagcagtctggaccgtgggtctctgctaacccagtctgcaggaggtgcatcattctccttgttggccaggtgaggctcactgagttaaatagtggtctttatcagctgtccccagctatctgtctctagcttccttccaaccaatgggtctgttattaaaaaatcaaacccaaccttctgtcatcctaacaaaattgggctttacatttgagggtctggggacatctctgaaggtggttagtattatgatgactctctaaaagaagcctcatgacgtrtgatcccaagttgataatggcagggtcagagtactaaggacaaagtcatgtattgcaattccatgtggaccaaactgtgcatagactatcaacatcaatggaaaatttctcatccttgatttcagcttttgtttcacctccttctctcactggcaagtttatcagtgctagtattggagtaaagtgattggtatgaagcctcacttttgtctgttatttctctcaaatgggtgaaggtgttaatggagggtaaacataatgaacaatcaagaacataataaagttagaggaacagcaggaagcttggatcaatggcccctggaaaattgagaattgactgtaattacaatagatcagaaggagttctcctatctcccaatgagttttctgctaaattcacctaaatcttaggagagtatcttagtctttaaagttgaatgggaaactttccttgtcctgtaaaggcttctaacatctctgtagataatagtgttacccttcttaaagtccaagccaactggagccctgcatagaagggaacactttctaactataaggcatgatgacttgcagagcatgcaacaccaattggaagaaataatatggtgggtttgttgtggttgttgttttaaattctgcctaagacctttgaggttacatggggtagagcatgccagttgaaaagaaatacaatattgtctattttcattaacctagtcctttttccatctttgtcgtcttcctccacccccttgctctgggtccagtggagaactcaggtgattcacccatctgcaaaatgatttgggctaggatacatcttgctttaaatgtctctgggaaacttctgagggtggggcaagaattctgagagggaggagtattgcttttgatatgaaaacagttgggattagrtgaatctgatttcttccaatcccactgacccttgagacagattgaccagatctggcaacaaaaccgtcatctccattgcaaaagaaggtggcttaatatccctactgcatgaccaaatgtttgctaatctagtttacagcaactattaagayttcaaatgtactgatattacagttttgcactgacattttccccttatgaatagaacaaatcttgttacaagggagacagcaatgaccagtatggaaatgtttaattggttatcccattttttttggtcccctagatttccttctcctcagacttggagggtggaggtgggcggggggaaaggcagcattgacacttttctttttctttttctttttttcagattcacaagagtaaaaaagacctcatagacaataaaagaggctgccagtgtcttgcatcattctagctgagcttcttcattctccttcttctccttcttccacaaagacccatatctggagaaggtgtacaactttcaaacacaagccccccaccccctgacccttggccttccctcacaccatctccttccaggggatgaatctttgggggttggtttgaggtcttagaactctgggggatattcccctgagcaaaacaaacaacgtgagatttttactcaaacagaaacaaaacatgaaggggcatcctcaaaatcctttgctaatgacctggctttcaaggcatctgtctggcctgatgagaatggacatcctggatatgctgggagaggcctgaaaaaagccacacacacagtaattgccattttatgactgtcaatgccgttactttaaatgttgtcatttttgcactggctactgatgatacagccatgctgacattcatcaccgcaaagatgatgattccagtctctggttcctttcctgagtcaggaacatttgttttctccaatttcctttcagacttaaaattgttcttatgctttttttcccacttctgtaatacagaattctgtttgttttctaaaaaagattattctryaggaatctttatttgatggctaatttattttctctgtgcattcattagtataaacctgaatgttcagctggtgactgtactgttgagtgggaacccattgtttccactggtagcatygataactaagtggttactgaaatttttaccactggctggacatcttcttttggatatctgtggttttatttcatcactcttctttttattcagtaaagtgctaagggaattagtatcagggagatatggcagataattctttgcattttagtgagtttttaaaaatacaagatagaagtggattaatagcacgaataaaaaataagaatagtagatgtagcatggaaagagaataacattgcagcccccttgagaccaaattacaggtgggatctaagggagtgcaagtaaagtgggattttatgagtctaaatgatgtgatttagataaaagtgattcttaaaatgtggttattggtcacacaggaatctctgagtccttcccaagagtgaagcacatgaatatgctgatgatgaagtggggattagtaatagaaagagagctaggcaataggtttaagtgtattccccactacagatttaatttctacatgaaaaagcacgagaacagatatttaaacgtccttttattactaaggtgaaatattggcattttttcaggcagaaagaaagagactgtatgtggtcttcctggacctttgccttgccaaaatgttccccaacagaaagatctgaagaactttgtagtatcgaatgcacaacagcatgctgatatttgaacagatttcttctgtcagctttacattttgccttggagaaacacttagatttttctgttgtgctccctgtgttcataacaatgacctcaccacataatgtggccagaaattcaaatgacttcaggggcctagcaggtcaagtaaatgaataaagcaagccatgtaatatcacagtcattgtggtaaatggcaattcatagtgggcctttgtatcagcaagacaggaaggagcaatggggactgtgagaaattggagagggtgggtgctgtcaaaacagggtagttggtaggcagcaactgaatttgagctgtgtggggatgggggtcctagatacctaggatttgatataagctctctccaaatttttacatattgacaactaactcaaaaacttacaaacactgtgctaatcaaatgaaacatgcctgtgagctgcattcaatccatggggcattggtttgcaagctatgttcttagaggtggtatgattttgtattgaaattaaatataaccaagagtatgtcaatttttgaccttggaacctggaccttttacctcatttatattctgtatttttgtatgtggggctttttggccagtcaaaatagaaagtctacagcttccattttataatctaacaagcaacaagaaacaacatttgaaaaagaaacaggaatatagccattttttctagcaccaataaaaatggaaatgtttttcatttgctttaagtcattaatcagctgaaaaagaatagaaagagaatttcattccataaagaacttcacctaaaactctcagtgaagcaaaacaaaactccatgtaactcactcttagctttaaatctttaaaaagtgtttcgaagggatattgagtaaaartgcagttatctattaaaaatacaaaatgctatattatatgatgctatgaattgatactggagctgataaaacattaaagtaattattccaaatcagtgctgactgcaaaagcaatatttccaaagctctagcttattttctgcggtcttttaattcccttgaaatagctttcttcaagttgagcagcaatttgggacaaacattattctattgcacagattatggcatcttactctggtttacacacacagagcaagggcttacacacctgaattaagaattaactagcatgtggggacagcaatagggatagtcctaccacagacgaaaccatgcgctctacacgtccctggrtaaaatgtgacaagttagcccttgaatttgggtccccatgtcaccaaatagctctatatttaagttgtgttaatgtggtacgtttcagtggcataatgacccattcttatcgaggcctttgttccatattttatttgtgccaatctttcttaggttatgagccctaatagtttatggcagcagrcaagagactcatttctaacccattaaattcaaatggactttcttccactgtccatttcatttttggagctgttataaactaccgaaaacatttgacaggatcccattgtggatctgatacacttaaacagtaaaatgatatctaaacatctgaaagccaaagaataacctagtgcacgtgttcattcatttgtagaatttaagccattgtattatattttccacttggaaccatgcctttagatacaaaagtgtaaagtaaaaagcaacattatcatgggatgtgagacggtaatccaaaagttgaagaccaatttttgttatccatattttggaagtatggatactgtttattttaatatcacttctctcatgggtcacttttccttagataggtaggtaggtagatagatagatagatagatgatagatagatagatagatagatagatagatagatagatagatagatagatagatagataatataatatattttcttctttcttaacctatgagcagagactttgatgatggaaattactttgtaacattccccatggagcctaggaaaaacaatagaaaaaaagcatgaaatctttttctcatagtgaaatagagaagattctaagattggaaatctgtgtatgtggtgttctatcccaaataaagagaatttagggaattcaggcaacaatttttttcctaattggaaactttgttctgatcctgagatgcccacacaccccacaggagacgcagtgctggcccaccacagtgtttggaacacggtcagcattcaggaaacacattcaaaatcgtctaactgaattccactatccacttgtgaatgcaaacaaaattcaaatttccctgaaaatttattcaacttctatatgccaagcacactgctaaaggcttatcttctaagtatatgcaggcataccctactcacacaaatagcttattaccagagataggaaattgcaggtaatttgggagaaattgtcatagccaaatttatggaaaaaataaaataaaaacttctctatggcctcttgatttaagaaaaaaacagaacaatacaaaaaaaaaaaagcactaaaacaggatttatctgagaatgtctttccaaaagggaagatgacaccaatctatataaaacgtcagtggatttactgagaatccgagtggaaacttttaaaaccttaaacagactctcctacagcaaatagattctctatgtgcagcatgaggaatcactgcatagttctgctccaccaataatatgattggtacagcaccaaaccatggcaaagttagatgttaaagaacataatgttgcaataatgatgttatattggatcttatgcatgaacaaatggaaagtaataatttatcaactgtgatccatgattaaaggcctcattatcactaagaaaatgaacttaatgaaaaaaattataatgagcaatgacaatattcctataaaacctccctctgggtatcaagagacatattacctgccaaggccagattttactttttaaggtttcctctctctcaccaaagacactagtgggcacagaggtgacactagagttagaatgttaccagagtcatttrcattagacagtttatctgatcatgaacatgttcccagggagattagaaaaatgggaagcaggcctctaaagatcctccttggacatttgtraaaaggctggctgcttctccaggaatgtctgaattaagcaagaattgtgccactgaaatagcttcttgtttttatattaaacaaggaacgattgtgcagtggatgacctggactgaaagatgtatgatggtcaagtttaaacatattaattcctgattgttttcttaaatacccaccctagtcattttttggaaaatattgccagacatatttgacatgaattcatgtttattctggcttctgttcccaagcagaagtggattaaccctggcaatggctggcttcactaactgtacttgcacccagcctgggctgccatctgctcagccaggagaagcagggagtggggtgtgggccctttaagttcgctcagggcacactcattcagtctcccctgaggagaccttgtccccctttgtggggtgaatgctggctgttgcaggccagaggcagtgccaactggagactcatcctctcagctttggtcagcttcagccacgtattcttcatgagtgctggcttctgaacctgcaggatcatttctcagtcagtttatggtgcagggtaattcatttaaaataaagcccattaaaaccccatggctatagaatgggttttaaatagattgtcctggagacacatcattgtatagtctttgcttccctctcatgacctatcttggagtagaatttgtgtactactgtccttgtctttgagtgggtatatgtgtgatggtacagaaatayagtcacatattatattaatatatatagatggataggaaaaacctacagccataggtattgtccaataactgattctagaggtagaactatagagtatacatttccttttttcttgctttgatgatatttttatacaattttatatgctataaaattttcaaaaatatatttgctattttcatttgtagagcttggttaggtttttatcagctcttgtgcccactgtacaaccagattcccctcatctaatttaaatgtcttccctttttcaaactctcctttatgttttcctttttttttcctcccatttttctacccttcacaaattccttcttttgcttctgtccaggtaacccattctgcttgcagtatcattttagcacgtacaaacacaaaataatgggaaaaataaaagcaccttgttccatgcaattcgtatgggaaagttttgggtgtcaaaggtcgctggggatagatggggaggcagaaatagcttgggaaaaggaagcaggaaaaaaggaaatctttatgggaaatcaattacccaaagcaaggtgagtcacctagaggtgaatatgatgttgttattgtcctcccttagtgtacagcacartttttgctctcacagggtttttctctttaggatgcgtagcaccctatgcattaaatacatagcatcctaaagacaccctactcaccwtgagtctgtaggctctttcctgatgagggcactggccatatatgaatggaaaactcaactcatctcctcagctttagatgttgctgctgttcagctggatttgtgagaaatatctggattactatcaagaacatttagcaagactcaaaagagagaggcaagcagaaccaaaacccaaacctcaaccaatgactagctgaataaacaattctttggaggaataaggaaggtatttctggatgtattctgagaatgctcttccaaaagggaagatggtaataatggacttgttttgatttcatggttgtgatagaatgtacttccatgatgtgaaatacacttctggcagataaaatgcaggttgtaatttgcatttgtacatcacagggtaaaagaatggccatccattctgaggaagagtgttctgttctctaagatgctgcttaaccartgttatccaaatgccatagcatcatatctccaaatacaagattaaatcataaggattcatgtaaaacagagtatactgagctgttctcagaaaaattaatgatgtgtttattgtaaatctttattgcacagatgagcctgacagtccttcaatgtataattttcccccagcatctagtaatgcataagtacttgtatgttcttctgattaccaaataaaaacaatgagttaacctcttaattggaattggaaaaatgaaaagacttttttttctttctttgaatgtttcccattgttgtccatgttctgtctcagatatagagctgtccaaactcagtcaaccatctgtctcttttgtattcccttaaacgtctcataatacccaggcaccaagtgcctttgcctgcatgctgaaagacatacacagagtatgactatatcacgtttcatttcaccttttttgactgtgagggatgaagtaaatgggttatcagaagcttatcagaggcataagaaatctcagcattcatggaattaagctggattccatatgtttaattttcttcagggtacaatgatatggttttacagccctgtgatgctagctttctgaattgcaaactttttctttctcctactcttgaaaggggtatatttggcaatattttcctgctcaagccatgaacataaggagtctgactagggaatgcagatgttccttgacttaccatggggtcacgtcccaataaactcattgtaggttgaaaaaactgtaagtcgaaaatgcatttaatatgcctaacctaccagctgtgtttgaatcatagcttaggctatcctgccttaagcatgctcagaacacattatcccagagttgggcaaaatcgcctaacacaaagcctattttataataaagtgttgaatagctcatgtaatttattgaatactgttctgaaagtgaaaaacagaaaggttatatacggtttcttctgagtgtgtattgcttgtgcatcatcatgaagtccaaaaatttaagttgggccatcatgagtcagggactctgtgtagtcattcattactcccctttgtggggataaaagtggtttacatcctttatggcatccagmctgatgccttcaaaccggcctcagagagagaaccctctagtggtgatactgaatattacacaaataccaccccttcatcagggcctcctggtgtatcgtttcgcatggtattattgctctgatgaaggcgactgtgatgtttctccaaagcagccatgcttgccattcactgaaacatatttttaatttttttcttaaagtaaaaatagaatttactcaatttggaaagtatcgacagtataataggaaacttaaaatcacttgtaataccccatccaacaattaatcatwgtagatactttattttcttatgatctttcgctatgcatttttacacagttaaggccatatagtatarttaattttgaattatggtttgttcacacaacattggattgtaagcattttcttgtgagtgtttttttaacttctccattaatataatttcaatagcagcataatattttattctgtggctctagygcaatttacttaaccacctctctgctgttgggcaattaacttatacgcttttattttattttttgcagttgtaaatagcagcaatggagctctttgtacataacgctttgtcacatttctgaatatctccactggacaaatttccagatatacaattactgggtcacaggttgttaacactttttttaactcctcattcatatgtccaattcaagttcaaagcacattcaaatattttgaaagccacatttaaatagcttgtggtgttgtatctctgaatagctcttgcttttaatcattcttctttgtgatgaacagacatattcaaatcacacgaaacyaaacctagtattgatggtggttgtattgtgcaggaaaaaagcattaaatactctgaatatgsagctctaatttatatactcttggttgataactcttagggcagtgtgtggggggtggggggtggggcgttgaagacctccagactctttcagtgttcccacagcctgaagcagaacttggacttttactgatgctctctcttcaaagctgtaaaggggcaaaaacgatgatttgttctgaggcttcaggcaatggcttgttgccctgtgccccagcccaaatggaacacaaagaagatgttggcagatatgctcagcaataatgatcagaggtctgtgggtatcagaaaggcagtcatttacaatatgctaaaacagagaaattgaaaatggccaataagttgacagaaactttcatacctcagcttttcagcatcctcctctgccctgtgggatctggttgtactataataacattgctattgccagaccattaataatgatgatgtttggtctcaagagctcttaaatcaccctttctccagcaggcataggcttggccaggctaaccccattttgcagaagggaaattatttgtttgaggttaagctgcaaatcactgtgctttagcactaactttgtgaagtcccgagtcttaggtgtgcgttcaccctgaggcgggtagccttagttgtcacttctatcactgtcctcttctccacactcttgatgaattggattcattgccctctagttgaaccaaacaaggacattaatttgaaatatctgaaagctattcatttgtcaaaggatacctcaagtcacataagctgcagtggtgacatctctgcccctagctgacggattgggttgtttactccttaaatggccacatgctgtgagtcaagggaaatgtaattcctgaccttaaagtgtttatttcccaaagatgacagattacctacttagacacacacacacacacacacacacacacacacaaatgcacacgtgcacacacacgcatgcgcacatgcacatacacacacctttctaaaacaaataataaaaactgtgttgtatgacacagtttgctaagcactgtcatgtgtgtactcttacttgatgctcgcaattattgtcctgacattgatgttttctcaatttcatagatgaggaaaatgaaatttagcaatagcagcattgacatagttgtttgttcatttgcttttattttacctcatttatcagatatttgagaattctaaaatcatgcaaatttaatacattgcttttttaatgattaagtaaayggaataaaaccagagtcacaaagtagagctagcatagatggaacaaaccagggcaaatgttaataagcagacgtgcagtctaaatcggcctcccctgattcctagcattatgccataaactgggtctaagttttctggaatcttaagtttaaatggaaataaaccatttacaagattcacatccgtgaggatgagcacaccagttgtttcagaagaaagtaaggcttccctcccgacaactgaaagaaacatctctgggtattcagtgaaggcagtgtttctcatggctgcagatcaggctcacctgggaacattaaaaagtcctcatgcccaggtcccacccagaccaactaaacagcatcttggggtgaagggtcaggtgtcagcatattgtttaagaactcccctgatgattctaatatgtagccaggattgaaaaccactgacagagtagatttctacaatgaatccaagaaccagttccatgtggtgggtggtctgaagccttctgtgtgcatcatacagtacagtttagaagctgggtcaggactggctgttcccacctggtttctgatgttcttcctggacatgagagggagcaacggaagtgtgaagtgcgaagggctttagaaaatgaaactcagatgtgttgggtattactcccatgagtggaactttgagtaaagtgataggtaatttggtagcttcctcatggaaagagatttcaagaacacatcctcagtgaactggaagccagtgggaggctgactcagaacctaaccccccgccaatggcccgtggcaaaatcaaaaccagttttattttatgtatccccgcctgctacctgtatatggctcatggttatgagaggtgggatggcttcatccctgtcctgatatattgggcatctcaccaagctaacagagaaaataacagcatttccagaaggccttgtagttctgctttttcactgactcaaggttcccagagttcccttactcagtgtttgcaaagaagayaccaaggggatgaaaagctacctctacgaaaagctatcaagctgcaggcttttggaagattatagtcagttattttttaaaaaattccaccaagcatttctatgaaataacctggcaatagcgtttctacaggtagcaacattggaagtttgtggtcattgagcactttgcagtttttcaggtactcatgtaggcaacattaaatttgttctctcaacttcacaagagtatccacagaaagcagaatgccacacttttcgttagttcgacaaaaggaaatttctaccacacaaggtgttccaagcctgtttgatgatgggaatcacctgggccacytgtgaaatacccaggtccctaaacctcgcctctggaagtgctggctccgagagcttagtgaggcctgggaaactggctttgtttttcatttttgttaaaataattgtcccaggtttttcttcctcttagacaactttgggagactgtgcttgaaggaaacccagacaatgggttggttaagaagcagcaagagtcaggggaaaaatttctttgagtttgaactttgaatgatcttgacttaagtttttccctcctcccacaacactcagtaacattagtcaagttccttaaacaaaatgtttggagacaaaaattgtcttcaaatcctgtaaaatgggataattttgttgtcagaatgttaaaatcagaaacaacaacaaatctatatttcacggtgcctacgtaatatggcaccagggccacagtaactgcttaatatgtgggagtgactattagcaatgaccaagcagccaaattgggaaccacatctctaaataaaaacttgaagccctgtctgcaacctaaaatagagattctcaatggagggcacttttgcctctagaggatatttgtcaccatctggaggatgtttatgatcgtcatgactagggaggarctactgacatctcatgggtagaggccagggacactgctaaacattctccagtgcacaggacagcccccaccacaaagaattgtacagcccaaatgtcacagtgtcactgctgagaaaccctatcccaaaggtcaaatgagacaagtaaaaaatcttgtgggacacagaggcatttcgggcagagaaggaacggctctggatcacaacataaaagacacagatgtgccctctggtagtgcctcctaatggggcctatttgttgcacacccagggtccaccattctttgtgtaagatacaatgcgacgggcatccactggggttgtgcattgtggcagcactggctttgacacagagtatcactttgcgtaaatctttcaccccggagtgtccaagacacttcattagaccagtgaagtgccagattacaagatcatcgttggaatcacctggtgaaattgttaaaattcaaattgctggctccattccctggagattctgcttcagggtccaatcaaggagcttggaagtcatatttataaacatcacctcaggagtaactgagttactcaactgaggttcaagaactgaagcacagctacagccagggttggaccctctatgttctccaccaactctgaccttcagggcatctgtgagacctggaaaatggagaaataaagtcccgccagatacagttcccttcacttcatacaaattaacagtttttgtaggtctgagctatttggattaattttatgttttctatttttactactactgctgccagaaaagaaggaaagaataataatgattaacaataacatttgttattgtctggagggcatttgtcacacaatgtcaggattggtgccctgttgtttaagatgaaaatggggctgggtgcggtggctcatgtctgtaatcccagcactttgagagcccgaagtgtgtggatcacgaggttaggagtttgagaccagcctggccaacacagtgaaaccccgtctctactaaaactacaaaaattagccaggcatggtggtggatgcctgtagtctcagctactcaggaggctgaggcaggggaattgcttgaacccgggagacggagcttgcagtgagtcgagatcgcatcactgcactccagcctgggcaacagagcgagactccatctcaaaaataaataaataaaataaaatggaacgatatcaaacgtcatccaaagtgcatgtctccactcttccccagggattctggggtagggaaagcttaccgctctcccactcacctccaaccccaagtctctgcttcctctgacactgcccagtcttcagattctttttctttttttaatactaattgtttctttcttttttttttattatactttaagttttagggtacatgtgcagaacgtgcaggtttgttacatatgtatacatgtgccatgttggtgtgctacacccattaactggtcatttaacattaggtatatctcctaatgctatccctcccccctccccccaccccacaaactgattcttttgttatctttatcagtgactatattgacacatagggtcttctcaatcagcacagcttccacttacaccaggcctctgcatataaagtggacttaactaaaagtttgggaagtttgtggggactcctaacggaagtaacctaacactgactcatggatatcctctgctgaggaattctctctgcatttctgccagctcagactgcaggcatctgccgtgttgctagaatctggcttccaggcctcttccttcccactctggatgacaaaataaatgaatgaatgaataaataaatatttatgtttatatataagatatgtgtccatatatgtgtctgtgtgtatatatttatacgtaaatatatgcgtatgtatatacgtacacacccacatacatatatacaaaaaatgtaaaattttttggcaggacctctcagttctccctttgtccctttattctgctctctccttattgatyccatcctggggtttgacttttcattgcctcgtgacccattaaagggtttattagaacaaagataatccccttcctcataggaattctgttgccagttgctgggaaactaagaaaccccactaaactagcatttgtgaagtctcccattgttcctgagcactggacacactttgcttcctttaatcctcactggaacacttcgacgcaattgttgtcattctcgtcattttgcagatgaagacctgagcttcagagagatccagttcattgcttgagttccaatagcaagtaaagcctataaggacaaagcagagacaaaacccccgattccctcattctaaatcagaacttccccttcttcagatagtcctccatcctgttccatcctggatgcacattagaatgaggggttttaaaaacatgagtgctgggcctccacccctgtactgtgggggtgacgcccaggcaacttcctatttagaaaacttcccctgtgatcctaaaatgtagcattgctcagtggcacatcggtcccaacayatcaaccttccagccagaggaactgcgtactgtcacacacacaaaggcaaaggcgatgctcccagcttttctggaccacagaatatgcaccaccctgcaacctcacctaacctgcttctaaacattgttttcagaccccaacttgataacatttcagatgaacatttacttgtccaacaggtttttccacaatcctacttttccttatcctctttttcctcttcacaggcacaaaacagcgttctcacggctcaccagccccaagcaccagctccacgtgtcgccttacgttgccaggtgggtaaacagcattgcaccattatcttagtgaccacagacaatggaaaggcctggtttctcgggaattgggttgataaactgagaacatggccccatagttatccagtctactcacgttatcagagagctttgtctctgtcaccctcatttgtgaggcccctctaggaatggacataaatatttctataattggttcacaatcgtccccctcacctatggaaagaatagaattttggtcctctttgatgttcatctgtacatgctatggaaggatctgccttgtagaggcagatcgtgcaagggaagtagtgtgagtctgtggtgagatcgagactcaggtttaaatcccagcttttctgtgttcaaattgtgtgccctcacatgtgcttcttcagcttcttggaatgtctgttttctcatctgtttgggagaagataagaattagaaataatgcttgtaaatttagcccagtattgacatagtgctcataataatctctactatcgagaaatatggaaggcatgtatgacctctgttcgacccaatctcacatgtactggcaaatcataagtattcatgaggatcaagtataattattgtttaatataaggggsacttattgatcattctgtctccatgcatgtgcttacattctcaactacaatttaatttttatttaattttaacgagcagaatttggaaaagcacatctgtttggggcaaggaaagattataaaagataaataccgtcattgaagaaaatttaaaaaatgataaacataagaaggaaaaatgttgccaataatgctaccactcagggttaaccaagattacctctccttccwgtctttattaaatactttttctctagatttgaattagattaatacyttatgtrgagttttgtttccttccttttaaaacttaccactacattatgagactttcttcatgttattaaatacttcaacaaatatttcagtaattgactaacatttctatgactatgccacagtttatttatatgtctattgataatttagcatttatataacatgcatttttataagtgaccttacattcttgtacataagtcttctgagtctgtaagtacggatttaccatagattccactargtaagattgctggctcaaagaatgcagacatatataggttcctgacacattattacctaagtgattttcagaaagatggtattaatgtatggttttagtgtgagtttgtccatttcaygatccccttgctaatgctaaacattattttcaatattttactgatttgmtaagagaaaaatgatatctacatttggtttgaatgtatctttctattaaaaaaacagtttttttagtgttaattcacctttacatttcttctttggggaattaccatatttcatccattctgagaggcacattgccttgcattttaacccattttgaattgggatgttttgcagtcaatggtgtgtgaaaattcaattagcagcatttttttttcttggttgtacatgaaataatagttcattttacaattagtggcattttagatgaaatatgacttatgtctgcctgcttttgtaacttcaatttctgtagctccctcacccaagtcaaacaagtggactccacatccgccgaataacccttgaacttttcttgcctctgtgagtgcctgggatgctccttattctcttcttcccttggctaatttctctttgtagtcctgtcaaaatcatctaggtggaattgacagtgcactacaatggtttgcttctaagtcctgttgtacattgataggtggctttttccatgatgaggactgtcttattcctttctgcccccagtgctgccaaggtgacaggcacttactgggtatgcattaatgtttctaagctgggtacgtggtgcgtgagtgagcagcctcccatttagtttacgactacacagaagggaaccatcctcagaaaaaaaggctcatcttaaagtttggatttgtttcaactctacagacttgcttttgagtagtgagtagatcttgttctatagtttctggaagcccctcgcatctcgtctctgcttgaggttattatgctcttgggactacagagtatcaggaagaaatcagctttaaaccaagcaattccagtgtgaagtgatggtgtttgctcctgacaaggtcatagccttgctagatcaggtgggatttctgagggcatccttgtcacctccaagaatatgcagagctgtcctgggacccacttgctctgctggggacccagggatggccactgggttcccaaggcctctgactcagaatcacagctaccttgtctttagccatccaaagtggtcccaaaaggagtgtcttaggctctgcattctgagcatctccaaagcctacagggctgtaaaccacamtcctctgccctacaggacttgagagatggtcagaggtggaagtgggtagttctcaaaacaccagacataattaatctgtgtaactggtactacacagtgtgcagattgacactacaggacagaagctgcagggcagctgtgcttcacatcctgaggggtgcacggaaggagctggaatcatgctttcactagcagatgtgctcaccacctcattgcaatacccagctctctacttcccttcctgcctcaggagcatcacagatgcctccctctggcttgtgtgccatgggggcccctgcccatgcatgctggctcctgctcacagctccaccttaccatctcatagctgtagaagagatgactcttctgaatgaccaccaatagatagaatcttttaaaaacctttgattttacagccagtgaatggatttaattggaattttagggttttatatttcttcaacaccacctacatgattagatccagtgcagtcaaatcaatctgctgtaagctgatccaattcagtcattaggagatgaaaacatttgctgtgaattccggtcaagatggttgagtaagttcattttttgacaaacactcctctgctcaaacacacgccaaggtaggtaaaattataataaaaaaatatatcttttaaaaaaactggtgccagagacaaacaactctgggaaccagaaaaaaaaaaaagagagagagagaactgcagaagccctgggacagctgtgatccacatcctgagtaaggagtggcaggaaggagcttgaatcctgtggagcaaaagggactaaaagtgcyscaggggacactgggaatcagagctagggctataacctgaatacaggacatggggtggacaggctaaaacaactgctgccagcctgtttcctccaagccacagcttaataatattaacaggaagctgttggcctagagagatggaaggacattgggacagcttttctgccagaccgagctagctttggaattggatctgcaatatgccaatatgattatagagcattagtcataaagtgccattataaggctctgaagtggaagtttaagggaggaggtggaagtaactacaaaactctaggcaggcgagagagagaaagaacccaaaacccaaatatcttctttttttttttttttttgagacggagtcccgctctktcgcccaggctggagtgcagtggcgctatctcggctcactgcaagctccgcctcccaggttcacgccattctgctgcctcagcctcctgagtagctgggactacaggcacccaccaccacgcccagctaattttttgtagagacggggtttcaccatgttatccaggatggtctcgatctcctgaccttgtgatctgcctgcttcggcctcccaaaccaagtatcttctacttgaaattagccaaaatgtcacaggcaacaaaagaagcaatagataaattggacttcattaaaattaaaaactttttatacatcaaaagacacatgaatacagtgaaaaggcagctcacaatatgagaaaatattttcaaattatatattgggataaggggttaatatctagacatatgaaagatataaagaactctggcagctcaacagcagcagcaacaacaacaaaagtaaaacccaattcaaaaatggccaaaggactggaatagacatttctccagagaagatctacaaatgggccaataagcacatagaaagatgctagtcattagggaaatgcagatcaaagccacagtgagatgccacttcacacccattaggatggctactataaaagacaaacagmaaatagcaggtattggtgagggtgtggagaaatgtgaaccctggtatattgcttctaggaacataaaataacacagctgctgtgaaaaatggtctggccaaaggcaaagtcaagaagcagggaagtgcaggttagaaagcaaagggcacaggtacaggaggaagaattggtgccagtagcagagtgtaccacagaaattggcaactggaacatgaatttcttctagaagaagttgatttttggtgcaggctgtcaaacactttaaaatgtatttaggatactcagacagccaaatggaggaaaaattatcctaaaaacaatgaagaaaaattgtacaaacccaagaaagcagagatatgtaaaagaagtggttcaaaatctgaaatttaaaaaaaggaagcaaacatatagtcattgcaattttaaaaaagagaaaactatcagttgatagtataagttcaaggtagaacacagtggaaaagttaattaatgttggaggatagtcctgaagactttacaccaaatatagcatggagagggaaccatatsaaaaaaatgaaagatcatgaaccataaaaatcttagaaggaaacggctgggcttggtggctcatgcacttttggaggccaaggcgggtggatcatttgaggtcaggagttcaagaccaacttgacctacatagtgaaaccccatctctactaaaatacaaaaattagcygggcatggtgatgggtgcctgtaatcccactacttgggaggctgaggcaggagaaacacttgaaccaaggaggtggaggttgcagtgagccaagatcatgtcactgcaccccagcctgggcaacagagcgagactccgtctcagaaaagaaaaaaaataaaataaaaaagaagaaaacatagaggtaaatcttcatgaccttggatttggcagtggtttcttaaacataacaacgtgcaaacaaccaagaaaaaattaggtaattgggcttcattaaaataaaaaacttttgtgctttggaaaccactatcaagaacgtggaaagacaatccacagagagaaaatatttgagaatcacatatctgatgaggatcttgtatccagaatatgtaaagaatccttacaactcaacaataaaaagacgacccaattaaaaagtggcaaggatttgaacaaacatttctccaaagaagatatacaaatgacatatgaaaaagatattcaacattattagtcattaaggaaatacaaatcaaaaccacagtgatataccacttcacatgcactaggatgctataataataataaaacaaatgaaataacaagtgatggtgaagatgtggtgaaattagcaccctcacatgttgctggtgggaatgtaaaatggtgcagccactttagaacacagtttggctgtttttcaaaaagttaatcatagagtgacttaaatgaagtactcatacattttacaacatggatgaacctagagaacgttttgctaagtaaaagaagccagacacaaaaggtcacatattgtattattccatttacataaaatacccagaatgggctaatccatagagacagaaagtacattagtggttgtcacgggctggggagaaaagagagtggagagtgacttctcatggatatgaggttgtttttaggggtgatgaaaatattctggaattaaacagtggtgatggttgtgaaacattatgaatataggaaaaaaccctcaaaatatatacctcaaaagggcaaaatttatggtttgtgaattatatctcaataaaaaatttaaaagcatggaagatagacaaattgccataaactacttctctcagaaattttagtaggatatggagaaagttgtgggaaagcaatatttcaacaaagaggtaataatttcccagaagtaaagaaagactcaaattcttagatggaaagtacatctccagtgccataactaaacaaaaacaaattcatacctaaagacattgaatgacattgcctaaagctacatcaagggtgaggaaaccttaaatgctatgagaagctgattatgtgcagggaagttgcaagtaatcaactgacagcaaaatttgcattggtaacagtagaagccagaagacaatgaagaaaatatcttccatatgctaagggaaaatagagcaatatgtaatagttaaaatagctaaattattgcttatgagtgaaggcacattaaaacattttcaggtatacaatgataatttaccacccacagacagactttcattaaaaaaagtgttaaggccaggcacgatggctcacacctataatctcagcactttgggaggctgaggtgggcagatcacctgaggtcaggagttcaagaccagcctagccaacgtgacaaaaccccatctctactaaaaatacaaaaattagccaggcgtggtggcacgtgcctgtggtcccggctactcaggaagttgaggcaggagaattgcttgaacctgggaggcggaggttggagtgagctgagattgtaccattgaactccagcctgggccacagcctgggccactccattcaaaaaaaaaagtgttaagggaagtatgtcaacaagaagaaaagtgaacccacaaggaatgtatgagacacaggaattaggggtgagcrcatcagtaattaaaacatgttggtaaatttgagtgactagtgaccataaaataacatccgacttttgtgttaaaataggaaagagaagctatagatggaaggcgggatgtttcaatatggacctaaggagtgctaagatctatcttgtctttggtcagaactaygtaatttttgtaactttttaacacaaaggatcatcagtaaaataatggaaacataatagcattgttattcactgaatatttgtgttcccaccaaattcatatgttaaaatccaatccccaatgttgcagsggtccgtcccacagaccttgatccaacaacagatgaataacatacactgacacagatattatgcttgtcagtccagctgagagtctgggccgcttacagaccccaaggagagtgctgtaaacagtggcaaccgcagcctggcccgactcactggccttcttagcatttattcagcacacattaaatgacaaaagtctcaagtaaacaccactagaaggtaattaccattgccaaccccccaagtagaaagcagtcatgcacctgctgatggcaaaggttagtcttaggaccacatgattaaacamgctatttagatagactcctctacattccaatgttaattacccttgctatagctcaaagaggattaggctgccttcagccataactctatcctgaggcttttgctaaaaccttctggcctttcaagaaggtttattttacaatttttcccaccatcctgactgaacccccacacaatgtgatgatgtttggaggtggagcctttgggaggtaatcaggtcatgaggatggagccctcacaaatgggattaacgaccttatgaaagagaccccagagagctagcttgstctgtttttaccataagagggcacaacaagaagtcagcagtctgcaacctggaagaggaagagggccctccctggaagccaactgtgctggaaacctcatcttggacttccagcctctagaactgcaagaaataaatttctgttgtttgtaacccactcagtcacagtactttgttatagcagcccaagctgactaagccaagtgtattagtcttttcttgcattgctataaagaactacctgagactgagtaatttataaagaaaagaggtttaattggcccacagttcttcaggctgtacaggaagcatagtggcttcttctggggaggcctcaggaaacttagagtcatggcagaaggtgaagggggagccagcacttcatattgccagagcagcaggaaacaggaggaggtgccgcacacttttaaatgaccagatctcatgaggaatcactcaatatcatgagaacagtaccagggggaaatctacccccatgatcaaatcacctcccaccaggccctacctccaacattggagtttacaactggacatgagatgtgggatgagacacagatccaaaccatatcagcaggcacctaaatcaacaaatgaacaacaataaacgaagagaatgtatcaacttaatagaaggctraaggaagacagagaagcaaagaataaagaatgataaacacaaaacaaaattaaacagtagaaataagtccaaaaatatcaggaataacaataattgcaagtggcttcaacttgcttttaaaatatagagattatttgattagataagaaagaaaaaatccaggtctatcttgtttttaagagatggcacccacagacagactttcattaaaagttttttcataaaaaaacttttgccatacattaggtttgctaatgcatagtaaaagaaattctatgcaaaatataaagctagttatttgaaaaccttcatccactttaacatttgtgtagtattttataatgcaaatattccaaaagacatataatcattctcctattaatggttgtcttccactttttgctattacaaacaatgctgagcataatgtcgagcaagtaaagcaagttgcaacaagatatatgctttctaatacaatttatattgtttcaaaacatgcagaaatattagatattttgtggatacaaatgcaataatttcatacataaatgcgcagcaatgataaataccaaattctggaggatggcttttccagagggaagagagtgaagtatcatagagaggatctgccgggtaacttaattctatctgtgttaatttctttcaaaaaatgtttaagcaaatgtaaaaattattaagattttattaaactttattgagagtatgggtatttattatatcattatttatacatttctgtatgcttaaatgattttatattaaagatttttttttttttgagacacagtcttgctctgtcgcccaggctggagtgcagtggcgccatctcggctcactgcaagctccgcctcccaggttcacgccattctcctgcctcagcttcccgagtagctgggactacagtcgcccgccaccacacccggctaattttttgtatttttagtggagacggggtttcactgtgttagccaggatggtctcgatctcctgacctcgtgatctgcctgcctcagcctcccaaagtgctgagattacaggcatgagccaccgcgccgggcccaaccacagatattttaacatttattgcatatctacaaatatcaggacaacattaggtccttaacatgtattatgtcattgaatcctcacaataaccctctaagggaggtactattatttctatttcacagattaggaaactaaggcacaaagagatgaatagyttacccaaagttagcagggggcaggcctgtgctcttttctctgaaggtcattgccaatggttaaagactgattctaaatagtcctcactgtaaccacttttctttcacacttgtattctgcctgggagtgagatcaagctccatgtaccaatatcaagcacattgttggggtgtgggagggatcctgcactatcttttaagtgaagactctggtaagtgttctctctgcaactgtcttttacctgagttgattgaaggatggcagttgtcacttactgtggactggattgaagcctatcccacttgatccagctttgttatgcaggagctctatcaccttgaagaaatgtatctttataggcttcttctgaaattggccactgttagtgtgaacaaaggacataggagcttctgaatagccttacatttcccatcttctcatgcacaagtgggaaaatgcacacgttgttaagaaaaatacagcaaaagacttagcttgcgttatctccaaaatatgattctccattgaaacaactagaatcatgccaagacaaacaaaatgaaaacgaagaaacacattaatgatgagaaaatttataaccacattataaatgagaaaattaaagatgatcatcaccttgagggagttcatttttagtctatttttatatccttagcattaaatcatgaagtcacagggcatttgataggaagccatcgtttgaaaaagagccgatttttccagcctcatttaaattgctcctcccctttcacctatttgttcagggaaagaaggctcaaaaaatatgtctcagtgcctccccatattatcatgagaccagtagaaatgagctaagattttagcatttgtgtaaaacaaggactcaaacttgaaagcttgagaggaaaggaacttgttgacattcttctcaagcaaacatgggcagcaaaatctaaatatcaagacaccgctgaagaaagagagaaatattcggatctgtagatcccaatcatcatttccagcttgtgtatattcaaagtgattcatttattctttagtaaatggaagatttatgaaggttactgaatgtgaagtagagtagtttattcactcattaaatatttctcaccaccagttaatactgtgattaagttctggggatgcatatactgcatacctatcctcaggaagctgataggcaggattgagttatttatggaataaggcacaaagaagctccaaaaaatccagggaatcactggctcaggaatggcttccaatgagtgactcaaataattaccatgactcggcataataaacgcaacgtgtcttaagaatgagaagtgtccttgacagttttctaatgatttcaagattaaaattcagggactggaactccttccgtcttggttggttatctaaggcatacttcccactgggatttccagcactctttgtacttgaggttaggtgttactcaaagtgattgaatgggctgggcagggtggctcatgtctgtaatcccagtactttgtgaggctgaggtgtttggatcaccgcggtcaggagtttgagaccatcctggccaacctggtgaaaccccatctctactaaaaatacaaaaaattatctgggtgtgatgttgcatacctgtaatcccggctactacagagtctgaggcaggagaatcacttaaacctgagaggttgcagtgagccgagattgtgccactgcactccagcttgggcaacagatcaagactccgtcttaaaaacaaaaacaaaaccaaagtgagtgaatgaaccactatatttttgcattgcctaaatggtttagaatgtgggctagccatttttcctttgcttaaaatggcacatagtttcagcaaagtggcttcctcaggtagcagaatagaaatatatgtatataaaatatatatataaaaatatatataatatatacataatatatatattttcacaaatgcagattttaaataactggtcttttgtgaatcaaagtggtgtattctctgccaaatattcacaaataaattcattaagttaatctcttcattgtgtggtgagatstttcatgtaataaaacccatcctgtggggaattatgtgacttttctatattgtaataagaagatccaccagggagggcgctatcacgaggcagcaatgatgaccttttgtcttcctgtgctgtgtaacaatgatggctgtatatcaaatacctacaacattctgggcattgtgtactgtgcaatggcacatgggtactgcatatgcatattcccatttatatttcctttaaaatcctcaccacaaccatggaaggcagttactattctcattttaaaaaaggaagaaagaaaaccaaaccctgagtgctagaacagattatttacttaggatttcacagctagtaatagcttagctctgtgacgtgccccaagcccatggtttttttcataagaccacccacctstcccaaaagcctctccatgggctcattttcctgtcacagaccttagcactaagatcctgtcttagatctattcttagtttaagaatagattatcaccttagacaacactacatctaatgcccatggtaagagagtaattttctctcataccatgggttaagtttgctaaattgtgtttctacaatcttagcacatggctgagggttgggcattcccagacaacaggaacagggagcaggttggccgccccattatccttctaaagctaagtataaaccaagttgctctcaaaacagactcagtcccaaagccagtggttttcaagcctggtcacacattaggataactgggcattacaaacatactgatgtttgggctccactccagggtgatcaattacttcagagactcctgggggtaaggcttgggcatcagtacttttcaaagctccccaagcaatctgatgtgcacccgggattgagaaccaccagtgggagaaaacaacttcaggttgcatggaaggtagcaaaactacatggtttatctgttttctatggatgcatatccctctagggatctggaaatgctggttgggtcatctttccataccatactagtggccgtttggttcagacaggatcaactcagctccttctaaatagcttctcagactgcaagcttcctgtcccctgcattctttgctctgtgtgatgaaaaaatggaagccatagagaattcagcattctcactttcttgaggtaaagtccttggagaatctgggtctttaaaaatgtaggtaatggggacaggcttggtggctcacacctgtaatcccagcactttgggaggccgagatgggcagatcacttgaggtcaggagttcgagaccactctggccaccatggtgaaaccccatttctactaaaaatacaaaaattatctaggcatggtgggatgcttctgtaatcccagctactcaggaggctgaggtgggagatcacttgaacccaggaggtggagtttgcagtgacccgggatggcgccactgcactccaggctgggtgacagagcgagactccatctcaaaaaaataaaaaatgtagataatgggcttaatcattctagtttttaatatgaaatataccttgaagagtttaagaatagattatcaccttagacgacactacatctaacgcacatggcacgaaagtaattttttggttgggttaaagttgctaaattgtatttctacaaaaggaaaggctcttattaatgtggcctcactataaggcttttgtgtcttagagaggcaaataaattccctagttgggaaagcatgctgctactaaattttcccggcacttgcaaatcttctagatagttcctaaatgtcttcatctgaggaaagggatggaaattgatactgaatgagcacctactatgtgtcagcactgtgctggctgttttcacatgtatgatatatttttattcttaccattgccctgtgaagtgagtgttattatttccatttttttaaatggaaaactgaaataaagtgtccaagtcctatggggacagtgccagaactgaatctggccagcttccaaggatggtgaggagttgcaaatagctcatggaagatgaagaatgagaggattggagagatgaagacagtagttttgaaactccagtacagtaaaattatctgaagagcttaaacaattcctgaaggcttagtcctaccctcatagattctgctttaagtgatctggggtacaaattgagcactaagagttttaaaagctatgtggttcccatatgcagccaggattgagaaccaccaagttaaagagtcctggagcttgcctggctagactccactggcctagagttttggaatacttgttaatattccagtctggcagaagggagggaaaagatgaaagcagttatttaagagaactctttaagtcaggaccttaatgtagttacttcctgagccattgccacaaactattttaaagtggggttaggggatgacttacttttgtttacagggaagcaagattattgcttcaaaattattgattattcaagggtattcaataatccagtatatgactcaggtayatacctaaatgttaataatataaatgagatacaattttgacttgactcytttattattggtagttattataacttactctgcattttggtacaagattattttagatatgggaggataggaggaagggtgtgaattcagattgcatgtgtgtgaatccagaatcaagactcctttgtgctaactgtgtgattttggccagttactttagccaaaatacatgcccagtacatagtatcagctattacaatgattttaccacagcggttcytgaaatgaaaatcacaggatcaaatctcatattgtcccatcctcagtggggctcacgttaacattccagtcccttgcagttcaaaactcctggatggtttttgtgcattttgataagggctttctaccacaaacagatactgattttagaaatagaatgtatagtagagttttttccttcatgtaaaataacatttaagtggcaataaatgattattttaatttcgttagtttagtatatgtggtttggtgtgtgtgtgtgtgtgtgtgtgtgtgtgtgtgtgkacacattgcagatagaaagtgtctataggagaaagtgctttttccaaatgtcatatcatagcattatgtttgaaagagaaaaaacagatatccaacacttatttttgtttaaaactaaggctaccaatattagaatttactcaaaagctccaagtagaccaaattattgccatttgaggtgatgctcacctgaagaggttcagaaaacctccacctgaagatactgctgcactgcagtgtggggttccaaaggtcacactgaagtcacagtggattgaaaggaccaaggccagtgctatgggaaatcatattgaactcaagggaatgaggccagacccaagcgtggatgaggactagcgrctgttctctcttgattgctctcayttagtggaaaacaacagggtatactgggttaatgacttgatatagtgtgataccatatgataagaaattaattccatttttctgaaggcgttttcactctataagatgtccttgataaaaaggagctatttagccaaataaaattgagagaaactacatgctattggctgttctcagggattcttaatagatgttagcattatttaaggtgctggtaagtcctggtgtgaagatactagtttaactcagttaaatttgattgaggaaaccctctccccacaaccacacctattacacagctttgttgaagggcactttggtttccaktagactaatataaataatcctaatagctgtatttgatatatgaataaatgtgaacctgtttcctggagaaaaataattctgtacaactgttccccataccaaaacaaaaaagtagccacgaagaaaaatgatgagagagagagagagaragagagaatggagagagagagrcagagagagagagagagaacaaaagataggctggttgtggcagtgaaaggggagaaaatcatagatacctttgggagaaatygttatatttatgaaaaataattaaacaattgagagttaaaactcctaaaagagcattgcttttatgaaaatcaaacatggagcataattataaaataaaggayggtgatgtatcaatttttggcttgaacttttgtttttctaagcatgtttaaaagtaatatagataattttcccaagttcaggtactgtgctgagatatgtgcctttgtcacaatcttcattaactaattagatcattttctccaagcaaattgttctaagagatgaggccagacttttttaaagtatccccaaggggaagaagtgtccaacttgctgataatcaaccatttatttgtggcaggggtggggatccaggtttggttcttctcyactagtggtcggggattgtacgactggttggattcagctgtgggaagtgcccagtcgttgaaaggaggagggtcggaccccttccgatagtttaggtatagccagacaattaatgagggtaccctcagaaggccataccaggaccccagaagaatggtccacattaaattcaagatggtgccctcatgcctggctctggtgttttgctctgtcaccaaatcacaatccattgcagaggggaaaggcaatgaatgcatacaaaacagcaatgtacgaaattttcctttatcccacattttgagtgagggtgacagcagccatataagtatttccacaaactcagtggggagtctacctatatcagcaggttcaactctatttgcagtgactccagtggcaaggagaggttttgttctgacaatcagaatcccagcaaatggtaaatgtttcttcatgctgagaagtgggaaattcagtaatactttggctgagttcctgctgagtagtgaaatagaatgaatatggagagggacggtgacttgaagagcagtgaatcagctggctcagacattgcaacaatctgcttttaagctgaagccctctcccctttctacaccattctccagggtaacggcactgcttttatgtttgttcctaggcaatttgatgccataatttcttgtttaccctaagaaacagaattaagcactctgagatctaataaacaaacctataataatatagaagaatatatattactatgtaacaacagagccatttgctgcaactctttacttcacgttaggatattgcaatgggtgaagttggcatgggtattaaggagcttgtagccatagcataatttatacctgaacactttttatttctgtgagtgagttaaaagtttcgaaggatcttattagaatggaagccctataaaggcagggatttctgtctgttctgttcactgttatatcaatagcacacaataggtactctaagaagtgggtgaataaatattttttgaaggcttttatgaggcatacttgggagtatgggtacctcataagtattttaaaaagagaagtagcataatttttttttaattttttttaccattttttaaattatactttaagttctagggtacatgtgcacaacgtgcaggtttgttacatacgtatacatgggccatgttggtgtgctgcacccattaactcgtcatttacattaggtgtatctcctaatgctatccttctgcctccccccaccccatgacaggccctggtgtgtgatgttccccttctcgtgcccaagtgttctcattgttcaattcccacctatgactaagaacatgcagtgtttggttttttgtccttgcaatagtttgctcagaatgatggtttccagcttcatccatgtccctacaaaggacatgaactcatccttttttatggctgcatagtattccatggtgtatatgtgccacattttcttaattcagtctatcattgatggacatttgggttggttccaagtctttgctattgtgaatagtgctgcaataaacatacgtgtgcatgtgtctttatagcagcatgatttataatcctttgggtatatacccagtaatgggatggctgggtcaagtggtatttctagttctagattcttgaggaattgccacactgtcttccacaatggttgaactagtttacagtcccaccaacagtgtaaaattgttcatatttctccatatcctctccagcacctgttgtttcctgactttttaatgatcgccattctaactggtdtgagatggtatctcattgtggttttgatttgcatttctctgatggccagtgatgaagttaatctgtatgctgtgaaaagtgtactcagctatggcttgtctgagatgtctagtactaaggtccaaggtgaacttggtttgactgattttctctcaggtgtgatttcgtagaataactctgatagatgattctatagaagaaatgtttactagtatgtttcttttttaaaagttacatgactagaacatgatcatcatagaaaaattagaaagtataaacaaccaaagagataaaatagccatgtttatgctactcagagataaccactgctatgatttaaatgtatgttcttccagattttcctatgcacatatgtttatattttctagtaatgaggttagataatatatcctgctttttcatttaacaccattacatgaacctctatttttgttagtagtcatctgtatcatctttccatagtatcacagtagcatattctaagaatggaccagaatttaaccaattccctatgattgttcatttaagttgtttctcatcttttgtttggtcacaagcaccatgcatgtccctgttattggaagagatgtgcagagctggtttttcacaaggaagcctcaggcattggacagatgggtccctgaccttggcccttccagcagatccaccgtgtgtcctgctcctgcactggctttttcagtgacagtggaggagcctgcagggaaagccagtgagcaagggttcaactggctctgtttccttgcactttcacctagttattatatctcatctgtttttgatgatcatttgacttgttttcacctttattcatgttgacattatctcactgaccaaacactttccagcagaacctagaagggatgaggtgggggctggcacagagaggagcagggggaggaaaagtcaatgagtattttaccttctatgtctagatctgcagattagatgctgtccttattattattaattattattattatctgaagttcctactttatttaaatttccctacttgttacccagtgtcatttttctgtcccagggtcccatccgggataacccattacttttagtcatcaactttccttagacttttcttggatgtgacagttcctcagacttccctaatttttggtgactttgacagctttgaggaatacctgtcagatattttgtggaatatctctcaattggaatttatttgatattcttcatttttagaatggggttatatatttttgggaggaagactccagaagtaaagttctattttcatcacaaaatattaattttcatcacatgccactggtgtcaaccttgatcccctggaagaagtgtttactagatttctctatataaagttactcttttgtctcatatatttatttatttatgagaaggagtcttgctgtgtcaccaagactggagtgcaagggtaccatcttggctcactgcaacctccacctcccaggttcaagcgattctcctgcctgagcctcctgagtagctgggattacaggtgtttgcaccaaccaccacacccagctaatttttgtgtttttagtagagatggggtttcaccatgttggtcaggctggtctcaaactcctggcctccagtgatctgccagcctcggcctcccaaagtgctgggattacaggcatgagccaccgtgccaagcctgtctcatattttagtctgtactttttggaaggatgtcactttgtccaatccatactaagggctccttctccttaagggaggcatatgtatataaattattctcccacaattatttatttattcaatcatttatttatatcagtgtggactcatggatatttattttayacttcgggttaaaatgcaatactgccttgtttattttgttgctcaatttgattcaattttgatcattcagtagatctttcattcagggctcctttgtctattgttgtatttgttttttgttttgttttgttttgttttttttgaacacttcaaattttctkgctctacaagatrcttcaggtacttcttgtatattttgtgtccgagttctggaatcagtcatttctgcaaggagccctggtttctgctattagcaaatggttttagaaaccaagatcagggcagtagatgtgcttattgctgctgagacttctagatttgtagtgacttcgttggtcctagaccccctccccttcagctgatagagcaagacaatatatgtgtgaatgccaactcatgtacatacacatatctataagtattttatatataatcacctgtatctctattaagctaaatattaattcatattgatataatcaagttcattaccacatggaccattctaacctcctccaacatttctcaccatccaccctctgtttacgtaattgttgaattctggtatacatgtagagtggtcttagagttgataaccaatagccccatgggaaacaattttatcagctagaatagagtgcttgtgtacagcttcttcggcctttagtcttgcagattctgttcatatacaaggttacttcgatgaccgtcttgtcccccactcttcagtgaggttgtttcctacattggcaatgcatttacattgtcttgttacaatttgcatttcattctaggattcctccgacctcttaaatagtttttttatttgcatacattaaggattattctatgtgctataaagttgtatgggtcttgacaaatgtgtagtgtcatatatacaccactacagtattgtatgcgagagtttcactgccctagaaattccctgtgcttcacctatttaaccatccctcctctttccaaacgcctgacaatctctgatgtttttatcatctctatagttatgtcctttgaagaatgtcgtataagtggaatcatatgctatacagcctttacagactgacttctttcacttagcaatatgtatttaagattcattcatgtctttccatagcttgatagttaatttgctttttatcacaatgaataatattccattgtataaatgtatcacaatttgtttatccactcaactattgaaggacatcttagttgcttccagcttttggcacttatgaataaagattctacaaaaattcatgtgtgggtttttatgtggacatacattttccatcaattgggtaaatacctaggatgcacaattgctgcattgcatggtaagactatgtctagcttcataagaaacggtcaaactgtcttccaaagtggctgtaccatttygcattccaatcagcaagaatgggagttcccattactttacatccttgccagcaattggtgttgtcaagttttttagattttagcattgtggaggtgtgtagtagcatrtagttgttttaatttgaaattctctaattgttgagcattttttcctatgcttatttgacacatayatcttccttggtgtgaagtctgttcagatrttttgcccattttaaaattgggttgtttctttttcttgagctttaagaattctttttatattttgaatacaagatctttatatgtgttttataaatattttcttaatgatgcacttttaagtatcccttggggattgagtgccactttccaaacactaaaagcttacatacaatgctaaatgctgttaatgatatacctgtgttcaccttgtttgctttgctgttcccagaaatgaccccaatgcttcctctcactcccttaaccccatccattcattgtcaaaggacctttatgtactgcagttatcactgtatctctagaaatttcttccatttatttattttaactgaatgaccaaggtggtaacgtgcttattcatctatctgccataaggtttccagggagaatccaaactgcttctttcctggtcttggaggaaacaaacaggtctagaggaagttgctcacaatatttaggttgtggcatgtcgtgggtgaggctaaccgttgtctgtcttcctttccatggccgccagtcatcaagcctcctttgcgtcattttaaacgccctgcttacgcatctagctcctatgcaccttcagtctcaaagaaaactgatgagcatcctgcaaggtacaagatgctggatcagaggatcaaaatgaaaaagattcagaacatctcacataactggaacagaaaataggccgaggggaagaagagagggagtgaaggagggtctacctatctgcttctcagcacccactggccacagcaggacacacctccaagacccttggaggctgttggagcaggtactatcctggttgactccaccaaggtgaaatgaaagttgtatgtgattttcctctttgttgttcttgtatagacttttcaattgctgtatgtgggatcagcccagacgccagcaacaaactagcaagaggggtgtttttatggtataagtctctaaaagtctaaattggaccaaaattaaaatgacacaaacttaaaaaaaaataaaattcctctcattgccacttttttcaatctctaaaagttacttgcccccaaaagaatattggtttaataatcatcatatttaagaaatgcactgataaaaacatattttccaattttaaatacacctatttaaaatgtaaatacacttatttaaaattcaagtaaatatgtaactatcaaagtaaatgtattcaaaacagaagttgtgcttctgaatgtaaaaatattaaaaggaagagaagacggatgaattgttgtattcatggacatttcagaattcatgcttataaagcaaatccaagttaaaaaacaaaaaaagatttttgtgcctcatgaagattgtgcctcatgcccaataacctcatgtactttgaaggatgtgaaggtttgcaagagatgcatttggcttcattttcctctaatcttttacttctacccacagtagatgatacaaaaaatcttgccttaaagactgcaggtttaagagtcattgcaaaagatgtcagtttgattttgtggtcctaggccaagagggtgtaaaattctgagcctagtttaaattctttattttcagattgttctggactgaaaataaagaatttaaactaggctagagatgcctttaagttacatttcagatcctcttcacagcacgctacatatctaaagcccttgagatcctgattgttctcacagttgttggtggaatccatagttttataactcacctctttttatggtggcattgttagcccttctgtgtctctccctaggatttttaattcaggactaaaatcacagaagtagcaaggaaaggctcaagactagagatagctttcaatctcttcagaaatagcctggtgcagtgagaaaactaggtttgttttcaggccagtctgatcttcatcctattctgtctataactagttgcaggtccttgctcggatggcataattttttgatgcctccatttgcttaactagaaactaggattcatatacacactctgcactttgtattgaagattaatgataatgtaggttttggttgctgtggctgagcctggccagtaataggtgcataacagaagtagctaagagcatttcataatcaggatgaactctccaggacagccctacaaagaaggagctgtttgttcccggatggcctcgaccttccaggcttgattgtaaagagtttagtgtcctctccttctctcattccctgcagttcatttccaataaactgcagttattcaagttgagcaagttccggaatttagtgcctaccatgctattgggcagtttatttataatgtgctttatgatgatacttcagagaaatttaattgctatacaaaaagacgaatcattgtgacttttcgttaaggaggcgattgcaattctttgctccctgcctggtgtctgggttagaaggcccttctgcaggctggtagtgtctgttccacctggattaggttaactcaacaggtaattcctatctgtttatacacagatgctttagcgcttgctgtacaaagtcatttggctacacactgaggaggcccatgggagtagtagcctcctcaaataatgttccctacctatctgtcaataccttccatcttaggtattgagaatttaatgaggctgtgttttcttggctgtgcttcttgatgttggaagccatgttcctggggaacaaatctgtattcttttctcctaagatgtgagtttttttcaacctttgctaatattttaatggagcaaatgtacagatgttgagattttgcactgcttataaaatgcctaccatgttttttgcataatggattgtatagaaatgcagattatattcttacagcaaataaaaagatgcttttaacagactttcttgtatgtgagccattttcttctctgaaattccgggatgttagatgttagctaaatttgctgctgttcagccctgaacatcttgtcaaggtgaatagtataacttacccatttcaattttcttccttattgtttaggtggtagttcattttttaacctttttctccctatacacccagtaaataaatttgttaatataaataacccataatagagtttagtcagcaggtgaacacctgtattatcaactcagtttatatcattccagaccaagctatcttgctagtggttaagaattgggactttgcccagctactcaggaggctgaggcaggagaatggtgtgaaccttggaggcagagcttgcagtgagccgagatcacgccgctgcattccagcctgggcgacagagcgagactccgtctcaaaaaacaaaacaaaacaaaacaaaacaaaaaaaacaattggaactttggagtttagaaaaacttacaattaaatcctgacactgccttttgtttgctctgggagctttactaaattgcataatatctctaaactttagtttctttagctgtaaattgagaataataagaattcctgactcattatagcacagggctggccttacagcaagggctcaataaatattagctattatttcttggacagagagtggagtatggtaaaaagaagttaggccctgagttcaagggtaatgtcccttactaattccatgacatcaggtagataatctccaacttcagtaaaaaggagttaatttcaccatgtattacccatttagctattcccacaggcaccagcttctgacatccccacctccaacaatttctccacctgtatccccaccccttggcctccttgggccttcatctactgtggccgtctcttgccctcatgactgactaggactctcccacaacctccctgagacttacttcctgcaaccactgcccttcactctgttcctatttaccctatctccttctccacacacaattaattgctttattcttccaaatttccactaacacaagtcaactgcagagagcagacttttcctaaaggtttaggataatagcacagcagaatcaactatttaaaaatttaaaaattagggccagacggggtggctcatgcctgtaatcccagcactttgggaggccaaggtgggtggatcatgaggtcaggagttcgagaccagcctatccaatatggtgaaacctgtttctactaaaaaatacaaaaaatagctgggtgtggtggcacgtgcctgtagtctcagctacttgggaggctgaggcaggagaatcacttgaacctgggaggcagaggttgcagtgagccaagatggtgctactgcactccagcctgtgcgacagagtgagactctgtctcaaaaaaaaaaaaaaaaaaaattagacaacagcgaccacaaaatatcagcctccctttgcagaggatttctcacaggctgtggattcccgaagcaccgatttgtctgcatcttctcgcccttcttctaccaagacctttctcctcccctgttgcattcaaattcctgtgaatgtgcagcatggtccacttctcaccccctacaccacacattttcaaggcgtagaagctcaccacattttttcagcaccacatattttcaagacatgtgagctcaccctgacaaacaatgggcattgactctgggtcacactcctataagcacaaaaaacccatagcagatttgaaatggcagtgtttcccttaaacaaaatccaatccttagggcaagaccaatccacgtaaggaaagaacccaataaatatatcctttccacttccaccaccacctctcctgcccaccccacttgaccctgcccaggagttctgcttgtttatttttttttccattcagttataatatcaacctcacaaaggtagggcagtgactttcatttataggtgcttagagaatgcaaattctcttgtcttcctaccttttccttctgcaagccagttaagccttatcatgagcacagccaccaagcttttgaaatagaacagacactccagcatccctctgttaggatttcttgtccctgcaggatagaaggagaaggtagagatggttgatagccactattttttaagtctaggattttcatccaaatctctcttccttagatgaaaggccacttgtacatcagcaagctttcagtttgttttcccattggctgcaatttcacatgatcaattatattctctttgatccattttcaatttaaaagaaatctctgttggaacaacatgctgatttattgagagtttgtcaaattaggttggaactggggatgccctgggactgagggtgggagtgggtgaaggcttcatgacttggcctccaagcgtggccctgatgtagcctcaagtgccgtcagcaaggccagttgaggcaagagaaggccctgcatcatagatggtgacagtaggcctttgctagtggttttatttttaagactgatctaggagacttatgagtattcattatacttttgttacattcacagaacatgaaaagctgcttttggggaataacaagtgataataactgtggaatactctcctcatctgcatattttaacttcacatgttcatattttaactgcatctttaactcataatgttcaacttgggttctctgtgaatgttcactggcatgctttgttttgtacacctgaataagagattcagctgagccaagcttatagaaccatctcgtctagatgtcagtcattatggagacaatgcatgtatggycattgcccttttagcagcatctcttatgactcactaggtaaagaaagattccaaacttttgtaagacacaaaggtaaaaggatactaaataaatataacaagagagaaaaatatatgtgattgtgaaactgcctttgcaaaattatgacagtaagagaaatctgacatagttgattccctcttgcttctgatctccaagctgcccttggttattcttgggtgtaggctaagctaacttcagaaggaatttagtttatagtttaagttgaaagggaggataagaatagtccctccctaaaactaatcccttccttgctcagggaccaaaaactgcctttgtaagactgacgaaaggccacaagaacaggattatgggaggagcctgaactctgctaaaatataagcacagtttttataatcctttcctgctcaggagttatatggccagagggttgtagaacccaagactgattttttttttttttttttgagatgtttttcagactgactccacctggacttgtgactcctgactcaactgatcctgtgaccacacccaggggcagactcagtgcatgagggccattttccacacccttatgatctcatccctaaccaatcagcagctcccattccctaacccctgcccaccaacttgcccataaaatctcctcaactcagagccctggagccttcagggagactgatgtaagtgataagtaagtgtaagttctccagtgtaggccagccttgtgtcagttaaactctttctctactgcaatgctgagatctcagtggactgatttttttttctgtgcaggaggtaggaagaactcatcaggtgattacaatcatagtgggcaaaaatttgaaatgatagaacactgctctagcatagtcggtttcaaaatccaggtaataatttttgagaacccaccaggttcctggcactttaatatatgctaatatattttttaactcttataatgaacctgtgtgggaagacttactgtccttattgttgattagccaatgggttaaatttttcagaaagtttgcagaactagtgaggaaaggtagaaaggaggttcaattgaggtcctttgattgcgctgctatatattttttccatgcattgtgttgttcacacagacttttctggtgtgcccctttgttgagcctgctccctggcatcacaagtttttcatattcaaccatgctcctgtcatccaacatagaattcaggaccagcagcaatggcatgattcttctcaacactcaggattgtgagtttccctctccctcttaggccaggattgattgtgtcctctactgaacccatgtcatgaagcatttctagaagaagacctacctacctttctaggagaagagctgacattaccacccacacatttggacctctggcctccatgcaccattgctcattgaatgcatcttccccacctctcatcagttaatccaaatggttggctctttctccaacttgtggctttttttccctgtcctctcaattaggacatgtcgacagcatagtccatgtgggaaaaaaaaattccctaatttttgtgtttcctacttctgtggatatctgactctacaccattctcattcttccctgaagtctcagaggaagctgtgttctcatgtttaaaactggtttcccccactgaaccatatccggtttctactgctgaaatatacttatatttgatttttatagaaagtcagcaatggaatccaactattttggatagatatccaaactgccagagcacagtgatatttccacaggcccattccccttgaactttctgaatctatgaatttgtccttgtcactctgtcagtcctgtacctgcactcctaatgacttgctggacttcttcatctgagtgtcttggagtgctgtaagtgtcactcccatattctcctgcagctcttgtacagtcttctccctgacgtctatatttctgttattgctactatcattttcctagtgactcattctcaaagtctttatcttttacattcctccaaatccatcttcacatttgtcactgattcttctctgggattctgcttctacctctgggttccttccttaggaattatagccctccattgcaagagagatatcccctctcatgtcagactccccctggagccagaaaacccacctccagtgaccagtggcagaggctttatcaagagaaacatgaagaacaagtttgccaacatgtgcattctccactgttggagaagtttgtccactcctgtcttacccagagggcttctcacagagggcttctctcagtcactgagaagactcagtacctgtcaacgagaagcgaacattttacagagagatctgggtactcctgacaccttgctcaaaggtctctcttttcccctactcgcccaccatactcagcataaagagatcaaatgagtgcaaagcatttgaattcaaatattctaagccaaaaagacataaatatcaccagacaattctgttcaataaataaatacatggggaatatactaactttcaaaggacaaagtttctcatgaagtgacatctattacttattactattttgcaccacctaccttcacatggagctgcttgttgactgagccaggtctattctcatttttgttcacatggcttcattttcattaaatgtcttttacttgccttttgcctttggaaatcttagttgttctcctaggccccacataaactttcaacttctctgggacttggtccctgatctctccaagtaaaagtggccttttgctgggattactcctcatcatgctcattttacttatttgagacacttaaatcattctcccacaaattacatagatcctggtgctttcctactatattatcatttcctggagagcagggaccatcccatttctttttcatactatatcctccgtagtgatcaacatagtgctttatgtaaaacagatccttgaaaatgtaatgagaggatgtggtaccaaatggaaacaagatagggatgggaaatgtataaattcagggaaaatattaccactcttcatctcccacttccagcagacaatcactaacttttctcaccaggcttagaaatagtctcagaaaccttc

SEQ ID NO: 94577 - DNA, 20252 bp, Homo sapiens
ttttaatgtttagaattatgagcatgacatatttatcagctaggcatagctaaagagattaattggtaaattgtaaataagttgatgaagcatggagattaaaaaaaaaaagaaagtgagacatgtaaaagggcataagagatatatggcagtctgcagaaagatttaacatatacataatcagagtcccagaatgggaggagagaggaaatgaggagaggcaaactttgggaagataataggttagaattttccaaaaccgaggagagacaccaaattacagattcaggaagttctgtgaaatccaagaagagtaaataaaaagaaaattatccttgtatcacagtaaaacaaagacaaaaagcaagcagcacctccattggcggcacagaaggaaatgtcatatttttatatgttcttcatcatcacaacattaaaattacaactgacatctcaacagaaatcatggaagaaagaattcaatggacttatacaaagtaccaaaaataaaactagctaccaaacactctagaattctatacccagaaaaaatatcttccaaaagtgaaggcacagtaaagacactttcagattaacaaaactgagataattcattatatcaaattcacactaaaaatttctaaagggaattctacagactaaaagaaaagatgccgaatggaaataagaaaatgcagagataagaaaatggaataatatgaaataattaatccaagaagaggcaagaacatagagaaaagcaatcatataatagttgagccaaataaaaaacaaatagacagcagataacatttaaatgtatcaataactaccttgagtgtaaatgaacaaaataaatatcaatcgtcacactggattttaaaaacaaatttttaaaatagcaacaatcaatgctgctttcacaggatacatcttaaatataaatgaacagggaggttgaaagtagaatggaaaatgtctatatcatgcaaacattagccaatagaaaacatatgtaattatagcaatgtcagacaaagtaggctgcaggacaaaatgcattactagagatataaagggcatctcctagtgataaacgatcattcaccagggagatatgacaattctaaatgtgtatgcaccaaattaatatgcttcaaaatatgtacacaatttaacagatataaaagtggaaatagacatatctacactcatagatataacatacctctctcggcaactaatttgcatttctttggttattagaggatcagaatcggttttgtgttcttagttttttgtggttatatatgaaaccgacttcatatatttcgcatgttttcccactggaatgttgcctttttgcttactgatatgtaagccttctttttaagatttactttacgacatatgctataagtggttcttgccagcatttgtctttttatttcatgagttttgaaatttttgtaaaatacgatcttaacattttaagtgatgtttcctgcattgttttcattcctgaaacctaaaagagtgtgttttgacagatttatttttccctagacagagtattctgagtcttaatattgacactataggttcaaagaaattcaccttatttaaatagaatctattcaaattgtactgaaattgtttgtgggaattttaagggagatctttctttctacctgaatgatctttcttccaaatctttatttgtttgacaaatatttatcgagcttctgttcagtgccaggcactgtttcaggagctagggataaggcagggattcaaatggaccttacctccccgcacattctgttgggaagaaggaagcagtaaacacatataggaacaaacctgtatggcctgtggagatgaacgcaacggagaaagataagacttttgggataagatggcaggtacaccttgatccactggcagactctttttgcatccttcaaaatgtcttggctgtcaccttgctctgcgtgctaactttgagccatgtcagttcttccacattacactgtggaattgacttgaattgacaaaacaaaaaaaaaaatggaggtaaaaagcgtttctcaaagattaattttttttgagacagagtcttgctctgtcacacaggctggagtgcagcggcgcgatctcggctcactgcaacctccgcctcccgggttcacgccattctcctgcctcagcttcccgagtagctgggattacaagaatgcgccaccatgcccggctaatttttttttgtatttttagtagagacggagtttcaccttattggccaggagccacaagtgctgccgaacttacaaagaaaggaatcaggccagccgctttgtctctctccagggcttcctgcagggcagacgcacgcayggcgaagttgccatctgagrggatggcttttaatttcactccaccaattaacccagctctttccactgaggagtgtgcctggaaagaagacagcagagttggatttgtacaggtgtgtgcatgcagttattaccaggccctggatcggcagagagcagccaacattgcaaacacaaggtccctcttaacggcacaggaggcagaactgctcctgactgctccctctcccctgcaccttcatgagaccccttttttcctggagttgtttctgttcctgtggaatcttgcttttaagtttaaagtatcaggcactaacaagggtaaagtgctgggtcaatatttatgaagtttttcatttgtttgaactcaaggataagtggcgagaccctggaaagtagatcccagaggtggacttagaaatcctaggctcaaatctgtgccctgcccctgactgtggagccttggggagcttggtggccaggctcagtaaacagtacctggaggaaagaaaccagccaggaggcatcaccactgtggcagatccatcctgtctcagagattctcaggaaaggcaattctcatgaaagccggccaccttttgccctgcagcccccaccgccactgtctcctgcttgacgctacccaggggcctgagatcacagaataacaaagctgcagttagggccgaggactttgatccccatatctagtttctctgcaatggtgctcagaaggccagataatcacaacagaagtccgcactggtagaaaaggtgacagagccagtcgcggtgatgtctccacacatttatttccttcttaacttgatctatccagttcccacccaagaatccaccccttccctgtagttcaggtctctatttagtgatacctgaggaactgttcttagatttggaaggatgctgtttggtttggtttgaatttgacataaaaccaaacattcgggtcttgaagtcttggctgatacccccacaacacactcacctgatcggatgagtaagccaccagcttctccatgatagcggcctgtgtgagctctggggacgctgcctgcagccgatggatcactttggtccgagcggccagcagggccaccagggtggcttcactggcacttccctaaattcaagrgaargtccaaatgaaatcccaaacatagcgaaggcattggtacctacactattggaagacatattgttttgtgtccatagttttcttaaaatatgagtctgaaatggcaaaattcactctcctttgcttaggagaaaactaatatttttgacacctgagaccaccacttcagctgttggtatgagtttgccattggtgggtctattttgtgtaacagcagcagctaacatttctgaccacttccctgcrccaggtattgtgagagcttctcctcatggactgcccccagcctggcctaggacgactgctcctgtctctatcagaggagaacggcccagggcaccagcatgcaagcctgactctgcgttcatattcactcggacagagcgatttgcatttgtttataaaataggggtgcattttccttgagactaagagatgccttaaagggtttcttttgattcctaatgacacgggctgaattgtgtccccaaaaattcatgtgttgaagccctaacccccaggacctcagatgtgaccatatttggagataggctttttagagaggtaattagaagaaaatggggtcacatggctgggctctaatccaatctgacatgtttctgataatatgaaatttgcctataatcccagcactttgggaggcagaggagggtcgatcacttgagccccggagttcgagaccagcctgggcaacataccgaaaccctgtatctataaaaatacaaaaattagccaggcatggtggcgtgcctggtagtcccagctactcgagaggctgaggtgggaggatgacttgagcctgggaggcggaggttgcagtgagccgcaattacaacactgcactccagcctgggcgacagagtgagacccagtctcaaaaaaataaataaataaaaagaaggggaaatgtggcccccagacatgtgggtgcacagagggaagaccatgtgaggacacagggagaaggtggccatctgcaagcccaggagagaggccccaggagaaccaaccctgtggacactttgattttggacttgcagccttcgggactgtgagaaaagaaattcttcttcgatccacccagtcagtggtattttgttagggaacccctggcaaactaatggattcagggcctgctatgttatcccatttaagttgtaaaaataatcccatttttgtgttttatcatcttcaggtggggaaacagatgtgcagagaggttcactaacttgccccaaatcagcagctaggtagggcacggttaggagtgagcccacgcctgcgctttttagggtgccatgggcctagaaaggtaggggcagcgagcaccttccctcttaagtaagtcgtagaagaaacccatctaccgaccagtatgaaaggacattagaaagggcaaataaaagaaggtaggttcttgttgactctgaaaaagtttataacatgataggtttttacagagaaatatataataaaataattaagtagaaatgctaacctctcttcttaacatttgatgctctcttcattgaccctgatttctcattttgactttgccttgacactacttttacttattcttttgagccaacccacatcctttggtgggacagtaatattgaaagacaaatacatttattcatgtttctgtagcactaatggatgggttcaaatatacagatatatgcgtctcttaattcagcatctaaaatgggtactttatttccttcaggctatattttcatgagcaatgattttagacattgttttaggccaggtttacaaaccttggccagaggagagagaaggggagaaaccaattttggctggcaaagctaaatcagccatcccaggaaacccaggctccctgagagcaggcattgtaccttacttacacttctcctatgtaccccatcattcctgtccctgatttcctcctgtccccctatctgcccccacacacattttgtttgtcatgtcccacccattctcattggaaatgtaacatgaaaagcctggtggaaggcacaattccctgttctgatgcttgacaagcaggcgtgactgcagcttccccggctaaattctaccctctgcttgaagcgttggaacgcaggtgttcattctctgaacattctaatgaaatgagtcaccatgaatcacctgaatcaccatgacaactcattatggcttttctctggggggggatgggggagcttagttcatgtcctaagagaaaattcaccttcttaagtcaacaaaatgatgttttaaaagcctgaaggagcaaatcgtcagtagcacatctagaaccacaccaccccgatgccaccagggtggcctggtggcctcaagcatgatgtcaggtggagctctctgcactttgctggcagcagatcttcgcggagagaagcacggggagggtgacatgtggtacagagcaggaacgatggctctgtgcgatagcagcagacaaaggttgccatggcaagcctgctcaggaggtaggaggggatgctggtaaggtctgacgcttctggctgctgatgccgtgagcagaaatgtcctttcatcttcagtttttttcgaagcaaaaaattgtcttttcttccacaagaactttaaaacccaattaagagaccattttcccagaccacatttgtccagcctcacaacaacagtttgccatttgactcagacacgcatcactgcgctgacgcccacagctgtgattacagctctgaggggatcaataatgcaggctggctcacaggctgtcaccaggctcctgtgctctttggggcctcaccaattacagacaatcagccttgtctgctgagaagggtgagcttccggtggcaaacacagatcccatttcttcctttcatccagaaaaaaactgagtggattgggctcacaggaagattgtgttaaagcgggggctgagagatgccaggaatattcctacccaaatgctaaagacttgtatggtctctcaaaaatgaggttgtctttaatgaaacgaaaatgcagcccatagtagcatgcacatctctggacaccaacccaagcctatggtcagggatgagctggtgtaacagycataactctggttgtctttcctactagccttggctttaattcacttttgctgctatgcatgttctactaactttctgggactcaatatcctcatccatgaaaaagattgtccataatccaatcaatcttcataaatactttgaggatgaagacaataacacaaagcacaagacataggctaaaacatagccaagctcataattgctattcaatgaaaagtagctcttattataatagacacagcttatattatgagggattgataagatttttttgaggagtatataattagaggaatcatctgctgaaaaaattgaatatgaaattgtttttgttataagatgcaatgacctagaaatgcttcaatttttgttttgttccatttggatttagtggggagcatgaatgttaaacatgaatacagccaggagagtcctaggaggaaggtgatcatcttggaagattgttgcacttcatcctaaagggtgtcctccaaaattttttttataagaatggaaaatttgatgcaacacaaatatcttaggtattatttatatatttatatagattgtgatgcatcatagaaaatcatggagtaatacttttttcaaacaatatttaaatagtgggaaatgctcacaataaaatgataaggaaagcaccatgcagaaaatccatatgcgtagtatcatttcaattttgtttgtatacatatattcacatgtagatactgaaataacacagggaatatgacaagaaagctcctgtgtcttttcatttttaccatgaatgtccagtatctaggtggaaaggggacttttttttttttttttgagacagggtctcactctgtcaccccgactggagtgcagtggcatgatctcagctcacctcaacatccacctcctgggttcaaatgattctcctgcctcaacctcctgagtagctgggattacaggcacatgccaccatgtccagctaagttttgtatttttagtagagatgggatttcaccatgttggccaggctggtcttaaactcctgacctcaaatgatccacccgccttggcctcccaaagtgttgggattacaggcgtgagccaccacaccaggtccataatcacataatcatgtggagaaaaccatgaaaagcttcctaaaatatagaagataacaaaaaagggaaatatcgaaagraagagagaaatcatggaagaggtacccaatctgtggaaaattgaagtccctgaaaaagagtgacgtggcccacaataactaacatacagtagaagaaaaatctccacactgcacagagctgagtcttgaatcagcagggctcaccaaatgctagggagggtcaaaatgaggggaacagtctgggtgcagtggctcactgctggatctgtcctgcagaccctggccgatggaggaaatgagtgctcagacacaggtatgcagtgtaagagcagctaagtgactgcctggctctagtggccagagagcagccctgagaagctggagcagcttgcttttattgagtgcaagcacaatgctgaaaacctggagcaaacacaacctgtagataattaacatttattgttcccctttcagggaatgtcacgtgcaaggatgttccgaggtcagttcctggacaacttctaacaaacaagcttgaccaagataaattcccctacactcccttgtacctactccttatcctctgcctcagggttatagaacagctgccttcagctattctgccatggagctttgcagagccttctgacctttcagaaggcctgctccttttccctatagtttctcccaccactctgaccgatctcctacagctcacacctgtaatcctagcactttgggaggccgaggtgggtggatcacctgaggtcaggagtttgagaccagcctgggcaaaatggcaaaaccctgtctctactacaaatacaaaaattatccaggcatggtgatgggtgccttgtaatcccagcttcttgggaagctgaggcaggagaatggcttgaaccgggaggcagtggttgcagtgagctgagatcgtgccactgcactccagcctgggcgacaagaatgagacttcgtctaaaaacaagacaaaataaaaaaaaaaatgagaggaacaaatggaaaagaaatggaaaagtagaccttgtcccgtgtataaaactaaaagaaaaagtaagtcggccaccaacatcgaggcctcttgtaaagggttagaccatgcatgcccttgcctggaatcaaaaccacgccctctgcaggcacgcagctgtcccactgggtccctgagtgctgctgccctctgtcccctggagaatcaggactgatgttccagaggccagaaagccatctggccctcaccaaggcaaagtgcagctgacagagcactggctgcggacagtgtgcagtagccccctcccctcgctggaagggcacctgtgacagcctatccttgctgtgatcttggccaaggaggcttctccagctgcatactcactgaccagaagaaaattgtgctgggactgaagcatgattcatttgctgaatcattgctgagtcattgttgctgctacgtagaatggtatggttcacagcaacgtattgaagctttgcttacaacatagctgacgttttcttttctttcttttttttttttcttgatggagtttccctctcgtcaaccaggctggagtgcaatggcaaggtcttggctcacggcaacctctgcctcccaggttcaagcaattctcctcccaagtagctgggattataggtgcccgccaccacacctggataatttttgtatttttagtagagacagggtttcaccatgttggccaggctggtctcagactcctgacctcaggtgatctgcctgccttggcctcacaaagtgctgggattacaggcgtgagccactatgcctgacatttcattttcctcagctccccatttaatatcacttatgtctgatggaaaaagagataaccaaagaatgcgaaggaggagcacgtggagggatgactctgagcctggccacagggcctgtgggtcatggagaaggcagtcatcagtcccggcatgtggcctattcaggaatctgggtgtcatccggatgaattagcgttcacattttttggcccagagtctaggaataggcattayaagcaagttccctccatgactctgaagcacactggatgtggtaggcacattaatgcaccctcattcccagagatttcaggtcttggtccccagaatctgtgactgtttcccttccagggaaaaggtgactttgctgatgtgattaagttaagaamcttgacttgagagattatctcagattgcctggatggacccaatccaatcatatgtgtccttaaaagtggagacccactttccgatcttatatgtggtcacaaggagatgcgaccaggaaagtgtgaaaggaaaataaatcttgggacccccaaatcactaagccaaagggaaaagtcaagctgggaactgcttaggccaaacctgcctcccattctattcctaaaagagatagctactaagataaaaagctacatgcctccctcataaggaatttccttttggatgaaggacagrcagaactcaaagtcacccctctgcccmctgagatagctgcacatctgatggcctcctttggaaaggctaatcagaaactcaraagaatgcaaccaattgtctcttatctacctatgacctgaaagccccctccctgctttgaattgtcccacctttccagaccaaaccaatgtacatcttacatctcatgtccccctaaaatgtatacaaccaagctgtgcccaaccaccttgggcacatgtagtcaggatctcttgaggctgtatcacaggcacgcatccttaactttggcaaaataaactaagttgactgagacccatctcagatatttggggtttacaaaagaaaggtcagaaagatgggacacagctggctttgaaaatggaaatggggctgtgagccaaggaattttggaagcctctagaagtcagaagaggcaaggaagcagattcacccctggagcctccaaggtgtcaactttggttttagcccagtaagacccaggtcagacttctgatgtacagaactgtaagataatcagtttgtcttattttgagccacaaaatttgtcacaacatcaatagaaacaaatacataaaattatcagtcttgttgctcattctcaggactggaagtggagagacttgcttgctagtttcgcgtggccacactggccatgtgctctgcacaaaggtgttctccagtgtgtgccwcactgtcctcatccactgaatgggccttcaccaattctcagagccttgtgaaagacaatatctgaaaaggaagcccctttttcccaaagttaacaatgctttcctaatgagactatcatctacttgacatgagaaaaatgattaagggagagtactgggttcaatatagttcatattccatgctaggaagttgttttttttttttttttaatgcatcaagtccaagtcatcccagtgccatttgtcctgcaaccccagtggaatagaaattccatcatgattgtcttttgtctatcttgttccctggtgtaagctctgacacacagtcactctcaatagatacatgttacatgaagaaaatgaattcagttgctgcatagaagcagcagcatctttaagtaaatgattggttcaaagacaaatagtatttatagcctctgaagcctggtcacatctgccacctgtgctgtcctccgaggaatatcacgggctctgagccacacagagtctgtagctggaagccatggggcaagctacctaatgttctggaccctagtttcctctcctgtaaaaagggctattaaaatgtttcttcacttgtaaaaaggggtactaaaatgcacagtgttgttgtgagaattaaatgagttaatgcctggaaaatgcttaggcacagtggccggcgatggggaaccccacacaaacgatagttgctgtagttgttacttccacgcacctgctgtgagatagcggytgtgctacctaccatagctaggggcctggggaactgagtgccctgccctggggaagcgagtgaaagacagcactgggatcctaatccagatcctgccaatcccaaagccagcattttcccaagagctcggttttgtttattctccaggagaaatttgaggaactaacaagaagcatgagtgcctctttccccacctgcrgctacagtcctgtgcagagcccatgcatcccaaaagtggccctcacagctcccaccttacctggatcactcctcccccttctccagctttctcattcaaaaatgcctttggtagttccagcatcttcccgagccagtccatcatcacagtctccagctctgtgcatgctgggcttgccgcctgtcgtgggggaagggaagggattaaccgagggccaggcattgcagaatttgggggtcagcagtaacaaggggatttaaccttccactaaagcccagattaaaatcacccaatctcagatgtgattcaaaggcctgaaggctgtttgacctagaatcatgcaaggagagcggttgggaaggaacatacgggccaccataatgaaccttactccactgagcctcactgcatgggctctgcgggcttgctaggatattcatttgttcactcacagaagggtccagaaagcccactggtggactttcctccgtagtcacaaatgaagggaatgagaaagtgggcgctgggcagctgtcaccctctgggcatcccgagaagccattgatcttgtcttttaaactcccagtgacttttctctatgaactctcccctctctctgaacaggctggtcttgagccccatccaaaggtggattgagtctccaccttcataaaagtctccaacataaggggtccaagatgttctcgtgcctagatgtgcacagcaacatcccgatgcgtcaccagtaagatctaagtgagaagagtgcattctcccttctggtcagccccatcctgctgggttctacctgagcctggccaagcccagctctaccaggagcctatgctctctgctagggatgaggtatcaggcaacgcagcctgagagatagtgaggcactcccttcaaggcctgagggcaatcagactgtcccagaatgagcagatagagatggatgccaagtacctctgtgggacagaatggatttggaccagcagagctaaatgaaatctgctgcaatatccagtgatagaaaatgctctttaggagagggtatgctcagcccaggccagccctgcccagcagagagggaggccccagtgcctggcagaggagcagcacagacactgaagagcccatctgtgggctcttcagccctgcctgtagggcccatgatgcctgctcacccggcaacttccagtgccccagcccagagaagagcaagtgccaggctggtgaagcagaggtggctcagctgggccctgtggctcagtgctgcaaattcctaattgacagctcctttacacatcacagcatgccacatagaccgatgcccacaagtccacctggctccaagccacagacaaggtgagtgctctggaccccaaaggccaaggacagcccctggcttttgaggaactccccagggtgcagcagccctcggacactggccatcagcaggcagctctacctccaagctctctgcatttgggaggaatgcatctttcctgtaatctgtgcctggagcacagagtcacgggcagagccagccctgcctaccgttcttctgagtagggacttttttaggcattttacctccagatagggtgggactggtggtttgcaggcaggagctaggcccttttccagagacccccctgctccaaggctctggacacatctgataggctggttggagcctctccccrggcagcagccctggtggagaacagaaggaatgagacaggggcagtcgcggttctcaagctttggaggatatagaaattctctgagctgcttggagaaatgcagattcccaggttcgagctgcagaaactctgggccccagaccatgatgttagttcataccaagtgcttccaacacagcctstgcagaatgggctttgagttgttgagactttctctgttctcaatcgctactttctcagaggcactctctctgggctgaatcctttctcctccctgcaacagtagcccgtctgcccacagacagcaccgccatctgctcaggtcccttgtgcataggtaccgtgtccccaccccgggatcccaccacagccaggaccccttcccgaggtgcatccggaccctcacccaggagaagccgatgcagccaatggccccgcacagcatgtccgcaagcatggccgggtacgagctggcagtggggaagtargcgaagaagtaggggctgtgccagtgygtcacctgcatgggaggacagagcagctgctgaggagtgaggaaagccaggcctcaagagagcgggggacccaggtacccccatggctcccagctgccagatgcagccagacccagagttaggtgagtgcagttccccaaatgtcagccatcccattaccttcctccattatttcggagcatttacacatcaccttactgtccccactccctttaaaccagctccctttttgacactggaatgtatttgctagctcagaaggaaaagttctatctccaaaataaagtggaaaatccttatcattttccataacaaaagaagtctcaaaaaaccacactgtgcttcaagttcttgctccggtgctctcgtcagtgaaggcgctgccccaaggctgatctctttgtgccaaaagcttagttttcctaaaactactctaaaaaataaagtctccattaaaaacaaacaaacaaacaaaaaaaaaaccaagctctggattttcgaggtttcttcagtcaagccacaaacatgcatctggtcttcccgctgcccctggctcttctagaggagctgaggccttccctccagccaagcagctggatcaccccacagatgtctcacctctgctgtccctcagcctggccactgccccttgccatttgccctggctaggggcatcccacctttctccagcccataaggtgaacacctgccactccctgggtgaggcacagaggaaaagctcatgtgggccagggaggagatccataaggggtagtgacagctccaggtggtatacttggggacagggggtttcaggatccaggaggcaagggttgtggtggacacccaggcagggaacatttagcaatggtaacaaggggccagcctcaaacatcttggagtctgggaggacgatcaggggaggacagagaaggagcaggtgtagcctagtctttgggtctttaatttgttcctgccaatgcagtacctgccctgaaggaacagaataaagtcctaaagccctcaggacaaccctcagcccctgtgcatggagaaggtatagaaattgccattcagacccctctcaggctgtgaccacgcactggtttctgagagacattgccctgttccgcattgtcccctgctggtgctccatgtccatcctgcctgtgggaatagcatggtgttgggagcacccctggactgcaagtccagcaggaaccctgatttgctgggttaccccagacaactgactgcacctccctgggccctgtcatcccttcagataaaatgaaagcacgtgctctgatgcttcctccaggtctggctcagaatcccagcagcagaggatatgctctatcgggcttggctgctctgctctgaatgtgagtatctgcacaccattcgcgtcgaaatcctaacccccaaagtgatggcattaagggacagcgtctttgggaggtgattagggcatgagggtggggtccccttaataagattagtgccccccaacagtgggattagtgccctcataagaaaaggcagagagctggctacctcttggttacgtgagtacacactgggaagacggctgtctgtaaaccaggaagagagccctcacctgaacctaatatcttgatctcagacttcctgtctctagaactgtgagaaatcaatgttgtttaagcccccagtctacgtcctttgatatagcagtccaagctaagatatctgtaagatatctcttacaatctgagaagagatgcaaacatttatttctcaatagcactcatcgttaaatatatgttgtctaagatgtagcatgagcaaccccctctgattgtgaaggcagccaactgagagagctcaccaagaactaggagtgttcagtaaggtttatttaacaaccacggccaccccaagtctgccagggcttggggagtggtggagagagggagctaacacagtctaggcttgggggctcaggtgtgggaggttggtgatgaggctgagaggccgagaggagctgcacaggctgtgatgccttcagcacagcaggtccaggcccacgacactgttaggggctgaaaaaatgcttaaatttcttctgtaatcaggaggaaaaaacagtgaactttcaggttaaagaaaaaaaatcgatgttaatatattcatctttatgccaatgcatttgtaaagcataattttccatatttctagggaggaaggagccgacaaagacaaagcgcccggggcccaggagagtttaagagcagccctgtggctgactagcccctccgcacctggagggcccatgtgcctttgtctctctccccttcctgtggcctctgggctggaaaaggacagaagcgattcttgattagggacagatgtgtgctcttttgcttcactctccgctgatattcacagcaacttttgagatggctgggcctgcacttgctccgctcacggctcgagagctcacctggtttcctgcgatcacacagccagcagttcgtgggctgcagctcccacccagggaccttgcccaacgcctgtgcatttcccagctcagctctgcgcagtgaatgcccccatagaaggaagcagaaagacttcaaatcctcccttactctcctgtactccccactgcctgacatttagccacacctctcccaaagggttttatgctgaacagcttagtgtacttgcacaatttctagaagaacctgaatcctgttctttgctcaaagcataaatgccaagtgagaatcccctggaagaagaaatgtgagcagtgtggtgagagaggcgctcagctactgagaaaccagtccctgaggtccagggcctgaggcctagtctcaacccatgatcagtggactgtaaccttgtctgaccttatgccttcacagggccttggcattctgtctacattgagggagtgggtcttgatggtcccagacccctcttctatgaaaatcacatgtcgttgctcataggccttacaaccacagacgtgctgggtcgcggcagtgatcaaccagtggagcccacggagattttccctgcctggactctgcacattgttgcatggaagggcaggtttggccatcctcataaacattcgtgatctagaaactggccgggctgcaactcccacccagaccctgactaggccagagccactttaaccaacaggcttttaggtgaactccttggcagagaaaatctactgtggaagcgtaaagctgaagggaagtttctctgagctccaactctgctgccctgtgagtgagtatcggagacagcagccagtcccgctgatttctgccctctgtgtaccccaggcctactggcttcagagaaaaagggctgccttggtgggcagcaccacactgcccactctcaaataaactaaagaaaacgtttcttccacatatgctaattacctattgctaaacccaaggatggtggaagtgtgctttatttggggcaattgacttatttgaaagcagccaccagtgtcttgcttcctaatgtatatgaggacacgctctatgtaccgagtgtctctgggcagggactgagtctcaggggacctgggggaaagagcctcactgcccttggatttggattttaatcctgacttcatcgtgtactacctgtgtgacctgaggtggaccacctaacctctctgagcctcagtttcctcagttgtaaaatagaaatgacaaaatttctctccaacctgactgccatagggattccttgaaacaaagtatgtgaattgctcagagccaagtaggtgctatgtgagttctagccctcctgttttctgaccttggatacacacttaccccaggcatgattatcttctcaacgtcgttgatgatgtcctcaaacgtgtctggctcctgaggggcagcggcagggatcagcggccgcaggtacccgggctccacgtcagggtagacctggcgtccctcaatgccttccatgtagttggccaygtaatccaccatctccttccctctccttcggaattcacttgcgttcatggtgtctgggctctgtcagaggtgaaaactgcagaaagaaaatgattcagtgagcaaattttgcaacctctgaactggaaggcggggataccaagcaagccgtgggtagggacacctgggcagtgactgcatgccctggaggccacttggatcccaagtaaggggcgctttccctccatgtctgtaggaggtagaaatggcactggatttgggactgaggcaaaagctgcttctcctcttcaccagctattcaactgggaacaacacaacgtcgctttatttcaatagactagaagcacacgtttattttcatgatcgattccaactttaatgacaaacactggtccaagtcctgcctctgcccttacctgcctttgaaagagacaagcttgccccttagagcccctctcctcatctgagaaatgaagactgtgatgctgacctctcaggagggcatgaaggcacagtcacacaatgcacacgagcctcagctcagagcctggggcagcacaccccctcaaacttagtcttcttctctcctcttgattctgtcacagatggaactgcacctttacgcaccatctgctttttaaaactaatgctctcctccctccttgcataagtaatatacaggcaattctcattattgctggtagctgtgttctatctacaacagttgccatggccataaactctgaattagtgaatactgaaccatttcttctaggggaaatacaatttcctgaagcgtgatcccaacatttttgtcaacaaatcaatacataaacttttcatgtgtttttaagagacactttatttaatatatattgattcattaacattggactcacagccaacagcactgtaactcctgtctggggaagcttctctaacacatatattttctccataaggcacgtcttgtgcataggatggctagacagcacttctgcaccacatttgggggtcattttaaacagcaaaatcaccaagaagaaaaacataaaaatgtgaaggatgtggcactgaatagacagagagaaggacatgtttacattatgagagctgacgcaagaaggtagtgtgtccctttgttcagcctcagctgggaacatacgcatcagacaagcacattctccactacgctacacatatgtacgtccctgagtggtctcaaaagcaccatgagtattgatatttattgacattgggggttacaaatgaattttagcaagtaggagaatttgcataggtggaatatgtgaataagaatcaattgtattttcaaaacaggacagtgaacaacacaaagaaaaagataagcctaaaatcccacaacccaaaattctggcacatgtctttctagaatttttattttactttattttatgtgtttatttttttgaaacggagttttgctcttgtcgcccaggctgaagtgcaatggcacgatctcggctcactgcaacctctgcctcccgggttcaagtgattctcctgcctcagtctcctgagtagctgggattataagcacccaccactatgcccagctaatttttgtatttttagtagaggcggggtttcaccacattggccaggctggtctcaaactcctgacctctggtgatccaccagcctcggcctctcaaagtgctgggattacaggcatgagccaccgctcccagcctctagaatattttctatttatgagagacaattgcatgctagggatggactcacagccaacagcactgtaactcctgtctggggaagcttctctaacacatgtattttctccataaggcacgtcttgtgcataggatggcacaaggaaaatgcatagggatgcattttcaaatctttttcatactccaaagttttgtagatgaggaaatggaagctcagagaggcaatgtgacatgcccaagatcacatgaccagtaattgcagaaataggattcaaatttatagctgg
